(19) United States
(12) Patent Application Publication
(10) Pub. No.: US 2005/0112574 A1
(43) Pub. Date: May 26, 2005

(54) Dna sequences for human angiogenesis genes

(76) Inventors: Jennifer Ruth Gamble, Stirling (AU); Christopher Norman Hahn, Modbury (AU); Mathew Alexander Vadas, Stirling (AU)

Correspondence Address: JENKINS, WILSON & TAYLOR, P. A., 3100 TOWER BLVD, SUITE 1400, DURHAM, NC, 27707, US

(21) Appl. No.: 10/489,740

(22) PCT Filed: Sep. 19, 2002
(86) PCT No.: PCT/AU02/01282

(30) Foreign Application Priority Data
Sep. 27, 2001 (AU) PR 7973
Sep. 27, 2001 (AU) PR 7974
Oct. 11, 2001 (AU) PR 8210
Oct. 29, 2001 (AU) PR 8532
Nov. 13, 2001 (AU) PR 8838
Aug. 28, 2002 (AU) 2002951032

(51) Int. Cl. C12Q 1/68; C07H 21/04; C12N 9/64

(52) U.S. Cl. 435/6; 435/69.1; 435/226; 435/320.1; 435/325; 536/23.2

(57) ABSTRACT

An isolated nucleic acid molecule comprising the sequence set forth in one of SEQ ID Numbers: 1 to 20.

### TECHNICAL FIELD

[0001] The present invention relates to novel nucleic acid sequences (“angiogenic genes”) involved in the process of angiogenesis. Each of the angiogenic genes encode a polypeptide that has a role in angiogenesis. In view of the realisation that these genes play a role in angiogenesis, the invention is also concerned with the therapy of pathologies associated with angiogenesis, the screening of drugs for pro- or anti-angiogenic activity, the diagnosis and prognosis of pathologies associated with angiogenesis, and in some cases the use of the nucleic acid sequences to identify and obtain full-length angiogenesis-related genes.

### BACKGROUND ART

[0002] The formation of new blood vessels from pre-existing vessels, a process termed angiogenesis, is essential for normal growth. Important angiogenic processes include those taking place in embryogenesis, renewal of the endometrium, formation and growth of the corpus luteum of pregnancy, wound healing and in the restoration of tissue structure and function after injury.

[0003] The formation of new capillaries requires a coordinated series of events mediated through the expression of multiple genes which may have either pro- or anti-angiogenic activities. The process begins with an angiogenic stimulus to existing vasculature, usually mediated by growth factors such as vascular endothelial growth factor or basic fibroblast growth factor. This is followed by degradation of the extracellular matrix, cell adhesion changes (and disruption), an increase in cell permeability, proliferation of endothelial cells (ECs) and migration of ECs towards the site of blood vessel formation. Subsequent processes include capillary tube or lumen formation, stabilisation and differentiation by the migrating ECs.

[0004] In the (normal) healthy adult, angiogenesis is virtually arrested and occurs only when needed. However, a number of pathological situations are characterised by enhanced, uncontrolled angiogenesis. These conditions include cancer, rheumatoid arthritis, diabetic retinopathy, psoriasis and cardiovascular diseases such as atherosclerosis. In other pathologies such as ischaemic limb disease or in coronary artery disease, growing new vessels through the promotion of an expanding vasculature would be of benefit.

[0005] A number of in vitro assays have been established which are thought to mimic angiogenesis and these have provided important tools to examine the mechanisms by which the angiogenic process takes place and the genes most likely to be involved.

[0006] Lumen formation is a key step in angiogenesis. The presence of vacuoles within ECs undergoing angiogenesis have been reported and their involvement in lumen formation has been postulated (Folkman and Haudenschild, 1980; Gamble et al., 1993). The general mechanism of lumen formation suggested by Folkman and Haudenschild (1980), has been that vacuoles form within the cytoplasm of a number of aligned ECs which are later converted to a tube. The union of adjacent tubes results in the formation of a continuous unicellular capillary lumen. However, little is known about the changes in cell morphology leading to lumen formation or the signals required for ECs to construct this feature.

[0007] An in vitro model of angiogenesis has been created from human umbilical vein ECs plated onto a 3 dimensional collagen matrix (Gamble et al., 1993). In the presence of phorbol myristate acetate (PMA) these cells form capillary tubes within 24 hours. With the addition of anti-integrin antibodies, the usually unicellular tubes (thought to reflect an immature, poorly differentiated phenotype) are converted to form a multicellular lumen through the inhibition of cell-matrix interactions and promotion of cell-cell interactions. This model has subsequently allowed the investigation of the morphological events which occur in lumen formation.

[0008] For the treatment of diseases associated with angiogenesis, understanding the molecular genetic mechanisms of the process is of paramount importance. The use of the in vitro model described above (Gamble et al., 1993), a model that reflects the critical events that occur during angiogenesis in vivo in a time dependent and broadly synchronous manner, has provided a tool for the identification of the key genes involved.

[0009] A number of genes have been identified from this model to be differentially expressed during the angiogenesis process. Functional analysis of a subset of these angiogenic genes and their effect on endothelial cell function and proliferation is described in detail below.

[0010] The isolation of these angiogenic genes has provided novel targets for the treatment of angiogenesis-related disorders.

### DISCLOSURE OF THE INVENTION

[0011] The present invention provides isolated nucleic acid molecules, which have been shown to be regulated in their expression during angiogenesis (see Tables 1 and 2).

[0012] In a first aspect of the present invention there is provided an isolated nucleic acid molecule as defined by SEQ ID Numbers: 1 to 20 and laid out in Table 1.

[0013] Following the realisation that these molecules, and those listed in Table 2, are regulated in their expression during angiogenesis, the invention provides isolated nucleic acid molecules as defined by SEQ ID Numbers: 1 to 114, and laid out in Tables 1 and 2, or fragments thereof, that play a role in an angiogenic process. Such a process may include, but is not restricted to, embryogenesis, menstrual cycle, wound repair, tumour angiogenesis and exercise induced muscle hypertrophy.

[0014] In addition, the present invention provides isolated nucleic acid molecules as defined by SEQ ID Numbers: 1 to 114, and laid out in Tables 1 and 2 (hereinafter referred to as “angiogenic genes”, “angiogenic nucleic acid molecules” or “angiogenic polypeptides” for the sake of convenience), or fragments thereof, that play a role in diseases associated with the angiogenic process. Diseases may include, but are not restricted to, cancer, rheumatoid arthritis, diabetic retinopathy, psoriasis, cardiovascular diseases such as atherosclerosis, ischaemic limb disease and coronary artery disease.

[0015] The invention also encompasses an isolated nucleic acid molecule that is at least 70% identical to any one of the angiogenic genes of the invention and which plays a role in the angiogenic process.

[0016] Such variants will have preferably at least about 85%, and most preferably at least about 95% sequence identity to the angiogenic genes. Any one of the polynucleotide variants described above can encode an amino acid sequence, which contains at least one functional or structural characteristic of the relevant angiogenic gene of the invention.

[0017] Sequence identity is typically calculated using the BLAST algorithm, described in Altschul et al (1997) with the BLOSUM62 default matrix.

[0018] The invention also encompasses an isolated nucleic acid molecule which hybridises under stringent conditions with any one of the angiogenic genes of the invention and which plays a role in an angiogenic process.

[0019] Hybridisation with PCR probes which are capable of detecting polynucleotide sequences, including genomic sequences, may be used to identify nucleic acid sequences which encode the relevant angiogenic gene. The specificity of the probe, whether it is made from a highly specific region, e.g., the 5′ regulatory region, or from a less specific region, e.g., a conserved motif, and the stringency of the hybridisation or amplification will determine whether the probe identifies only naturally occurring sequences encoding the angiogenic gene, allelic variants, or related sequences.

[0020] Probes may also be used for the detection of related sequences, and should preferably have at least 50% sequence identity to any of the angiogenic gene encoding sequences of the invention. The hybridisation probes of the subject invention may be DNA or RNA and may be derived from any one of the angiogenic gene sequences or from genomic sequences including promoters, enhancers, and introns of the angiogenic genes.

[0021] Means for producing specific hybridisation probes for DNAs encoding any one of the angiogenic genes include the cloning of polynucleotide sequences encoding the relevant angiogenic gene or its derivatives into vectors for the production of mRNA probes. Such vectors are known in the art, and are commercially available. Hybridisation probes may be labelled by radionuclides such as ³²P or ³⁵S, or by enzymatic labels, such as alkaline phosphatase coupled to the probe via avidin/biotin coupling systems, or other methods known in the art.

[0022] Under stringent conditions, hybridisation with ³²P labelled probes will most preferably occur at 42° C. in 750 mM NaCl, 75 mM trisodium citrate, 2% SDS, 50% formamide, 1× Denhart's, 10% (w/v) dextran sulphate and 100 μg/ml denatured salmon sperm DNA. Useful variations on these conditions will be readily apparent to those skilled in the art. The washing steps which follow hybridisation most preferably occur at 65° C. in 15 mM NaCl, 1.5 mM trisodium citrate, and 1% SDS. Additional variations on these conditions will be readily apparent to those skilled in the art.

[0023] The nucleotide sequences of the present invention can be engineered using methods accepted in the art so as to alter angiogenic gene-encoding sequences for a variety of purposes. These include, but are not limited to, modification of the cloning, processing, and/or expression of the gene product. PCR reassembly of gene fragments and the use of synthetic oligonucleotides allow the engineering of angiogenic gene nucleotide sequences. For example, oligonucleotide-mediated site-directed mutagenesis can introduce mutations that create new restriction sites, alter glycosylation patterns and produce splice variants etc.

[0024] As a result of the degeneracy of the genetic code, a number of polynucleotide sequences encoding the angiogenic genes of the invention, some that may have minimal similarity to the polynucleotide sequences of any known and naturally occurring gene, may be produced. Thus, the invention includes each and every possible variation of polynucleotide sequence that could be made by selecting combinations based on possible codon choices. These combinations are made in accordance with the standard triplet genetic code as applied to the polynucleotide sequence of the naturally occurring angiogenic gene, and all such variations are to be considered as being specifically disclosed.

[0025] The polynucleotides of this invention include RNA, cDNA, genomic DNA, synthetic forms, and mixed polymers, both sense and antisense strands, and may be chemically or biochemically modified, as will be appreciated by those skilled in the art. Such modifications include labels, methylation, intercalators, alkylators and modified linkages. In some instances it may be advantageous to produce nucleotide sequences encoding an angiogenic gene or its derivatives possessing a substantially different codon usage than that of the naturally occurring gene. For example, codons may be selected to increase the rate of expression of the peptide in a particular prokaryotic or eukaryotic host corresponding with the frequency that particular codons are utilized by the host. Other reasons to alter the nucleotide sequence encoding an angiogenic gene or its derivatives without altering the encoded amino acid sequence include the production of RNA transcripts having more desirable properties, such as a greater half-life, than transcripts produced from the naturally occurring sequence.

[0026] The invention also encompasses production of the nucleic acid molecules of the invention, entirely by synthetic chemistry. Synthetic sequences may be inserted into expression vectors and cell systems that contain the necessary elements for transcriptional and translational control of the inserted coding sequence in a suitable host. These elements may include regulatory sequences, promoters, 5′ and 3′ untranslated regions and specific initiation signals (such as an ATG initiation codon and Kozak consensus sequence) which allow more efficient translation of sequences encoding the angiogenic genes. In cases where the complete coding sequence including its initiation codon and upstream regulatory sequences are inserted into the appropriate expression vector, additional control signals may not be needed. However, in cases where only coding sequence, or a fragment thereof, is inserted, exogenous translational control signals as described above should be provided by the vector. Such signals may be of various origins, both natural and synthetic. The efficiency of expression may be enhanced by the inclusion of enhancers appropriate for the particular host cell system used (Scharf et al., 1994).

[0027] Nucleic acid molecules that are complements of the sequences described herein may also be prepared.

[0028] The present invention allows for the preparation of purified polypeptides or proteins. In order to do this, host cells may be transfected with a nucleic acid molecule as described above. Typically, said host cells are transfected with an expression vector comprising a nucleic acid molecule according to the invention. A variety of expression vector/host systems may be utilized to contain and express the sequences. These include, but are not limited to, microorganisms such as bacteria transformed with plasmid or cosmid DNA expression vectors; yeast transformed with yeast expression vectors; insect cell systems infected with viral expression vectors (e.g., baculovirus); or mouse or other animal or human tissue cell systems. Mammalian cells can also be used to express a protein that is encoded by a specific angiogenic gene of the invention using various expression vectors including plasmid, cosmid and viral systems such as a vaccinia virus expression system. The invention is not limited by the host cell employed.

[0029] The polynucleotide sequences, or variants thereof, of the present invention can be stably expressed in cell lines to allow long term production of recombinant proteins in mammalian systems. Sequences encoding any one of the angiogenic genes of the invention can be transformed into cell lines using expression vectors which may contain viral origins of replication and/or endogenous expression elements and a selectable marker gene on the same or on a separate vector. The selectable marker confers resistance to a selective agent, and its presence allows growth and recovery of cells which successfully express the introduced sequences. Resistant clones of stably transformed cells may be propagated using tissue culture techniques appropriate to the cell type.

[0030] The protein produced by a transformed cell may be secreted or retained intracellularly depending on the sequence and/or the vector used. As will be understood by those of skill in the art, expression vectors containing polynucleotides which encode a protein may be designed to contain signal sequences which direct secretion of the protein through a prokaryotic or eukaryotic cell membrane.

[0031] In addition, a host cell strain may be chosen for its ability to modulate expression of the inserted sequences or to process the expressed protein in the desired fashion. Such modifications of the polypeptide include, but are not limited to, acetylation, glycosylation, phosphorylation, and acylation. Post-translational cleavage of a “prepro” form of the protein may also be used to specify protein targeting, folding, and/or activity. Different host cells having specific cellular machinery and characteristic mechanisms for post-translational activities (e.g., CHO or HeLa cells), are available from the American Type Culture Collection (ATCC) and may be chosen to ensure the correct modification and processing of the foreign protein.

[0032] When large quantities of protein are needed such as for antibody production, vectors which direct high levels of expression may be used such as those containing the T5 or T7 inducible bacteriophage promoter. The present invention also includes the use of the expression systems described above in generating and isolating fusion proteins which contain important functional domains of the protein. These fusion proteins are used for binding, structural and functional studies as well as for the generation of appropriate antibodies.

[0033] In order to express and purify the protein as a fusion protein, the appropriate polynucleotide sequences of the present invention are inserted into a vector which contains a nucleotide sequence encoding another peptide (for example, glutathionine succinyl transferase). The fusion protein is expressed and recovered from prokaryotic or eukaryotic cells. The fusion protein can then be purified by affinity chromatography based upon the fusion vector sequence and the relevant protein can subsequently be obtained by enzymatic cleavage of the fusion protein.

[0034] Fragments of polypeptides of the present invention may also be produced by direct peptide synthesis using solid-phase techniques. Automated synthesis may be achieved by using the ABI 431A Peptide Synthesizer (Perkin-Elmer). Various fragments of polypeptide may be synthesized separately and then combined to produce the full length molecule.

[0035] In instances where the isolated nucleic acid molecules of the invention represent only partial gene sequence, these partial sequences can be used to obtain the corresponding sequence of the full-length angiogenic gene. Therefore, the present invention further provides the use of a partial nucleic acid molecule of the invention comprising a nucleotide sequence defined by any one of SEQ ID Numbers: 70, 72 to 73, 78, 83 to 87, 89, 160 or 174 to identify and/or obtain full-length human genes involved in the angiogenic process. Full-length angiogenic genes may be cloned using the partial nucleotide sequences of the invention by methods known per se to those skilled in the art. For example, in silico analysis of sequence databases such as those hosted at the National Centre for Biotechnology Information (http://www.ncbi.nlm.nih.gov/) can be searched in order to obtain overlapping nucleotide sequence. This provides a “walking” strategy towards obtaining the full-length gene sequence. Appropriate databases to search at this site include the expressed sequence tag (EST) database (database of GenBank, EMBL and DDBJ sequences from their EST divisions) or the non redundant (nr) database (contains all GenBank, EMBL, DDBJ and PDB sequences but does not include EST, STS, GSS, or phase 0, 1 or 2 HTGS sequences). Typically searches are performed using the BLAST algorithm described in Altschul et al (1997) with the BLOSUM62 default matrix. In instances where in silico “walking” approaches fail to retrieve the complete gene sequence, additional strategies may be employed. These include the use of “restriction-site PCR” will allows the retrieval of unknown sequence adjacent to a portion of DNA whose sequence is known. In this technique universal primers are used to retrieve unknown sequence. Inverse PCR may also be used, in which primers based on the known sequence are designed to amplify adjacent unknown sequences. These upstream sequences may include promoters and regulatory elements. In addition, various other PCR-based techniques may be used, for example a kit available from Clontech (Palo Alto, Calif.) allows for a walking PCR technique, the 5′RACE kit (Gibco-BRL) allows isolation of additional 5′ gene sequence, while additional 3′ sequence can be obtained using practised techniques (for eg see Gecz et al., 1997).

[0036] In a further aspect of the present invention there is provided an isolated polypeptide as defined by SEQ ID Numbers: 115 to 125 and laid out in Table 1.

[0037] The present invention also provides isolated polypeptides, which have been shown to be regulated in their expression during angiogenesis (see Tables 1 and 2).

[0038] More specifically, following the realisation that these polypeptides are regulated in their expression during angiogenesis, the invention provides isolated polypeptides as defined by SEQ ID Numbers: 115 to 216, and laid out in Tables 1 and 2, or fragments thereof, that play a role in an angiogenic process. Such a process may include, but is not restricted to, embryogenesis, menstrual cycle, wound repair, tumour angiogenesis and exercise induced muscle hypertrophy.

[0039] In addition, the present invention provides isolated polypeptides as defined by SEQ ID Numbers: 115 to 216, and laid out in Tables 1 and 2, or fragments thereof, that play a role in diseases associated with the angiogenic process. Diseases may include, but are not restricted to, cancer, rheumatoid arthritis, diabetic retinopathy, psoriasis, cardiovascular diseases such as atherosclerosis, ischaemic limb disease and coronary artery disease.

[0040] The invention also encompasses an isolated polypeptide having at least 70%, preferably 85%, and more preferably 95%, identity to any one of SEQ ID Numbers: 115 to 216, and which plays a role in an angiogenic process.

[0041] Sequence identity is typically calculated using the BLAST algorithm, described in Altschul et al (1997) with the BLOSUM62 default matrix.

[0042] In a further aspect of the invention there is provided a method of preparing a polypeptide as described above, comprising the steps of:
[0043] (1) culturing the host cells under conditions effective for production of the polypeptide; and
[0044] (2) harvesting the polypeptide.

[0045] According to still another aspect of the invention there is provided a polypeptide which is the product of the process described above.

[0046] Substantially purified protein or fragments thereof can then be used in further biochemical analyses to establish secondary and tertiary structure for example by x-ray crystallography of the protein or by nuclear magnetic resonance (NMR). Determination of structure allows for the rational design of pharmaceuticals to interact with the protein, alter protein charge configuration or charge interaction with other proteins, or to alter its function in the cell.

[0047] The invention has provided a number of genes likely to be involved in angiogenesis. As angiogenesis is critical in a number of pathological processes, the invention therefore enables therapeutic methods for the treatment of all angiogenesis-related disorders, and may enable the diagnosis or prognosis of all angiogenesis-related disorders associated with abnormalities in expression and/or function of any one of the angiogenic genes.

[0048] Examples of such disorders include, but are not limited to, cancer, rheumatoid arthritis, diabetic retinopathy, psoriasis, cardiovascular diseases such as atherosclerosis, ischaemic limb disease and coronary artery disease.

[0049] According to another aspect of the present invention there is provided a method of treating an angiogenesis-related disorder as described above, comprising administering a selective agonist or antagonist of an angiogenic gene or protein of the invention to a subject in need of such treatment.

[0050] Still further there is provided the use of a selective agonist or antagonist of an angiogenic gene or protein of the invention for the treatment of an angiogenesis-related disorder as described above.

[0051] For the treatment of angiogenesis-related disorders which result in uncontrolled or enhanced angiogenesis, including but not limited to, cancer, rheumatoid arthritis, diabetic retinopathy, psoriasis and cardiovascular diseases such as atherosclerosis, therapies which inhibit the expanding vasculature are desirable. This would involve inhibition of any one of the angiogenic genes or proteins that are able to promote angiogenesis, or enhancement, stimulation or re-activation of any one of the angiogenic genes or proteins that are able to inhibit angiogenesis.

[0052] For the treatment of angiogenesis-related disorders which are characterised by inhibited or decreased angiogenesis, including but not limited to, ischaemic limb disease and coronary artery disease, therapies which enhance or promote vascular expansion are desirable. This would involve inhibition of any one of the angiogenic genes or proteins that are able to restrict angiogenesis or enhancement, stimulation or re-activation of any one of the angiogenic genes or proteins that are able to promote angiogenesis.

[0053] For instance, antisense expression of BNO69 and BNO96 has been shown to inhibit endothelial cell growth and proliferation. Therefore, in the treatment of disorders where angiogenesis needs to be restricted, it would be desirable to inhibit the function of these genes. Alternatively, in the treatment of disorders where angiogenesis needs to be stimulated it may be desirable to enhance the function of these genes.

[0054] For each of these cases, the relevant therapy will be useful in treating angiogenesis-related disorders regardless of whether there is a lesion in the angiogenic gene.

Inhibiting Gene or Protein Function

[0055] Inhibiting the function of a gene or protein can be achieved in a variety of ways. Antisense nucleic acid methodologies represent one approach to inactivate genes whose altered expression is causative of a disorder. In one aspect of the invention an isolated nucleic acid molecule, which is the complement of any one of the relevant angiogenic nucleic acid molecules described above and which encodes an RNA molecule that hybridises with the mRNA encoded by the relevant angiogenic gene of the invention, may be administered to a subject in need of such treatment. Typically, a complement to any relevant one of the angiogenic genes is administered to a subject to treat or prevent an angiogenesis-related disorder.

[0056] In a further aspect of the invention there is provided the use of an isolated nucleic acid molecule which is the complement of any one of the relevant nucleic acid molecules of the invention and which encodes an RNA molecule that hybridises with the mRNA encoded by the relevant angiogenic gene of the invention, in the manufacture of a medicament for the treatment of an angiogenesis-related disorder.

[0057] Typically, a vector expressing the complement of a polynucleotide encoding any one of the relevant angiogenic genes may be administered to a subject to treat or prevent an angiogenesis-related disorder including, but not limited to, those described above. Many methods for introducing vectors into cells or tissues are available and equally suitable for use in vivo, in vitro, and ex vivo. For ex vivo therapy, vectors may be introduced into stem cells taken from the patient and clonally propagated for autologous transplant back into that same patient. Delivery by transfection, by liposome injections, or by polycationic amino polymers may be achieved using methods which are well known in the art. (For example, see Goldman et al., 1997).

[0058] Additional antisense or gene-targeted silencing strategies may include, but are not limited to, the use of antisense oligonucleotides, injection of antisense RNA, transfection of antisense RNA expression vectors, and the use of RNA interference (RNAi) or short interfering RNAs (siRNA). Still further, catalytic nucleic acid molecules such as DNAzymes and ribozymes may be used for gene silencing (Breaker and Joyce, 1994; Haseloff and Gerlach, 1988). These molecules function by cleaving their target mRNA molecule rather than merely binding to it as in traditional antisense approaches.

[0059] In a further aspect purified protein according to the invention may be used to produce antibodies which specifically bind any relevant angiogenic protein of the invention. These antibodies may be used directly as an antagonist or indirectly as a targeting or delivery mechanism for bringing a pharmaceutical agent to cells or tissues that express the relevant angiogenic protein. Such antibodies may include, but are not limited to, polyclonal, monoclonal, chimeric and single chain antibodies as would be understood by the person skilled in the art.

[0060] For the production of antibodies, various hosts including rabbits, rats, goats, mice, humans, and others may be immunized by injection with a protein of the invention or with any fragment or oligopeptide thereof, which has immunogenic properties. Various adjuvants may be used to increase immunological response and include, but are not limited to, Freund's, mineral gels such as aluminum hydroxide, and surface-active substances such as lysolecithin. Adjuvants used in humans include BCG (bacilli Calmette-Guerin) and Corynebacterium parvum.

[0061] It is preferred that the oligopeptides, peptides, or fragments used to induce antibodies to the relevant angiogenic protein have an amino acid sequence consisting of at least about 5 amino acids, and, more preferably, of at least about 10 amino acids. It is also preferable that these oligopeptides, peptides, or fragments are identical to a portion of the amino acid sequence of the natural protein and contain the entire amino acid sequence of a small, naturally occurring molecule. Short stretches of amino acids from these proteins may be fused with those of another protein, such as KLH, and antibodies to the chimeric molecule may be produced.

[0062] Monoclonal antibodies to any relevant angiogenic protein may be prepared using any technique which provides for the production of antibody molecules by continuous cell lines in culture. These include, but are not limited to, the hybridoma technique, the human B-cell hybridoma technique, and the EBV-hybridoma technique. (For example, see Kohler et al., 1975; Kozbor et al., 1985; Cote et al., 1983; Cole et al., 1984).

[0063] Monoclonal antibodies produced may include, but are not limited to, mouse-derived antibodies, humanised antibodies and fully human antibodies.

[0064] Antibodies may also be produced by inducing in vivo production in the lymphocyte population or by screening immunoglobulin libraries or panels of highly specific binding reagents as disclosed in the literature. (For example, see Orlandi et al., 1989; Winter et al., 1991).

[0065] Antibody fragments which contain specific binding sites for any relevant angiogenic protein may also be generated. For example, such fragments include, F(ab′)2 fragments produced by pepsin digestion of the antibody molecule and Fab fragments generated by reducing the disulfide bridges of the F(ab′)2 fragments. Alternatively, Fab expression libraries may be constructed to allow rapid and easy identification of monoclonal Fab fragments with the desired specificity. (For example, see Huse et al., 1989).

[0066] Various immunoassays may be used for screening to identify antibodies having the desired specificity. Numerous protocols for competitive binding or immunoradiometric assays using either polyclonal or monoclonal antibodies with established specificities are well known in the art. Such immunoassays typically involve the measurement of complex formation between a protein and its specific antibody. A two-site, monoclonal-based immunoassay utilizing monoclonal antibodies reactive to two non-interfering epitopes is preferred, but a competitive binding assay may also be employed.

[0067] In a further aspect, antagonists may include peptides, phosphopeptides or small organic or inorganic compounds. These antagonists should disrupt the function of any relevant angiogenic gene of the invention so as to provide the necessary therapeutic effect.

[0068] Peptides, phosphopeptides or small organic or inorganic compounds suitable for therapeutic applications may be identified using nucleic acids and polypeptides of the invention in drug screening applications as described below.

Enhancing Gene or Protein Function

[0069] Enhancing, stimulating or re-activating a gene's or protein's function can be achieved in a variety of ways. In one aspect of the invention administration of an isolated nucleic acid molecule, as described above, to a subject in need of such treatment may be initiated. Typically, any relevant angiogenic gene of the invention can be administered to a subject to treat or prevent an angiogenesis-related disorder.

[0070] In a further aspect, there is provided the use of an isolated nucleic acid molecule, as described above, in the manufacture of a medicament for the treatment of an angiogenesis-related disorder.

[0071] Typically, a vector capable of expressing any relevant angiogenic gene, or a fragment or derivative thereof, may be administered to a subject to treat or prevent a disorder including, but not limited to, those described above. Transducing retroviral vectors are often used for somatic cell gene therapy because of their high efficiency of infection and stable integration and expression. Any relevant full-length gene, or portions thereof, can be cloned into a retroviral vector and expression may be driven from its endogenous promoter or from the retroviral long terminal repeat or from a promoter specific for the target cell type of interest. Other viral vectors can be used and include, as is known in the art, adenoviruses, adeno-associated viruses, vaccinia viruses, papovaviruses, lentiviruses and retroviruses of avian, murine and human origin.

[0072] Gene therapy would be carried out according to established methods (Friedman, 1991; Culver, 1996). A vector containing a copy of any relevant angiogenic gene linked to expression control elements and capable of replicating inside the cells is prepared. Alternatively the vector may be replication deficient and may require helper cells for replication and use in gene therapy.

[0073] Gene transfer using non-viral methods of infection in vitro can also be used. These methods include direct injection of DNA, uptake of naked DNA in the presence of calcium phosphate, electroporation, protoplast fusion or liposome delivery. Gene transfer can also be achieved by delivery as a part of a human artificial chromosome or receptor-mediated gene transfer. This involves linking the DNA to a targeting molecule that will bind to specific cell-surface receptors to induce endocytosis and transfer of the DNA into mammalian cells. One such technique uses poly-L-lysine to link asialoglycoprotein to DNA. An adenovirus is also added to the complex to disrupt the lysosomes and thus allow the DNA to avoid degradation and move to the nucleus. Infusion of these particles intravenously has resulted in gene transfer into hepatocytes.

[0074] Although not identified to date, it is possible that certain individuals with angiogenesis-related disorders contain an abnormality in any one of the angiogenic genes of the invention. Therefore, in affected subjects that have decreased expression or activity of an angiogenic gene, a mechanism of down-regulation may be due to abnormal methylation of promoter regions of those angiogenic genes which contain CpG islands. Therefore in an alternative approach to therapy, administration of agents that remove abnormal promoter methylation may reactivate gene expression and restore normal function to the affected cell.

[0075] In affected subjects that express a mutated form of any one of the angiogenic genes of the invention it may be possible to prevent the disorder by introducing into the affected cells a wild-type copy of the gene such that it recombines with the mutant gene. This requires a double recombination event for the correction of the gene mutation. Vectors for the introduction of genes in these ways are known in the art, and any suitable vector may be used. Alternatively, introducing another copy of the gene bearing a second mutation in that gene may be employed so as to negate the original gene mutation and block any negative effect.

[0076] In a still further aspect, there is provided a method of treating an angiogenesis-related disorder comprising administering a polypeptide, as described above, or an agonist thereof, to a subject in need of such treatment.

[0077] In another aspect the invention provides the use of a polypeptide as described above, or an agonist thereof, in the manufacture of a medicament for the treatment of an angiogenesis-related disorder. Examples of such disorders are described above.

[0078] In a further aspect, a suitable agonist may also include peptides, phosphopeptides or small organic or inorganic compounds that can mimic the function of any relevant angiogenic gene, or may include an antibody to any relevant angiogenic gene that is able to restore function to a normal level.

[0079] Peptides, phosphopeptides or small organic or inorganic compounds suitable for therapeutic applications may be identified using nucleic acids and polypeptides of the invention in drug screening applications as described below.

[0080] In further embodiments, any of the agonists, antagonists, complementary sequences, nucleic acid molecules, proteins, antibodies, or vectors of the invention may be administered in combination with other appropriate therapeutic agents. Selection of the appropriate agents may be made by those skilled in the art, according to conventional pharmaceutical principles. The combination of therapeutic agents may act synergistically to effect the treatment or prevention of the various disorders described above. Using this approach, therapeutic efficacy with lower dosages of each agent may be possible, thus reducing the potential for adverse side effects.

[0081] Any of the therapeutic methods described above may be applied to any subject in need of such therapy, including, for example, mammals such as dogs, cats, cows, horses, rabbits, monkeys, and most preferably, humans.

Drug Screening

[0082] According to still another aspect of the invention, nucleic acid molecules of the invention as well as peptides of the invention, particularly any relevant purified angiogenic polypeptides or fragments thereof, and cells expressing these are useful for screening of candidate pharmaceutical compounds in a variety of techniques for the treatment of angiogenesis-related disorders.

[0083] Still further, it provides the use wherein high throughput screening techniques are employed.

[0084] Compounds that can be screened in accordance with the invention include, but are not limited to peptides (such as soluble peptides), phosphopeptides and small organic or inorganic molecules (such as natural product or synthetic chemical libraries and peptidomimetics).

[0085] In one embodiment, a screening assay may include a cell-based assay utilising eukaryotic or prokaryotic host cells that are stably transformed with recombinant nucleic acid molecules expressing the relevant angiogenic polypeptide or fragment, in competitive binding assays. Binding assays will measure for the formation of complexes between the relevant polypeptide or fragments thereof and the compound being tested, or will measure the degree to which a compound being tested will interfere with the formation of a complex between the relevant polypeptide or fragment thereof, and its interactor or ligand.

[0086] Non cell-based assays may also be used for identifying compounds that interrupt binding between the polypeptides of the invention and their interactors. Such assays are known in the art and include for example AlphaScreen technology (PerkinElmer Life Sciences, Mass., USA). This application relies on the use of beads such that each interaction partner is bound to a separate bead via an antibody. Interaction of each partner will bring the beads into proximity, such that laser excitation initiates a number of chemical reactions ultimately leading to fluorophores emitting a light signal. Candidate compounds that disrupt the binding of the relevant angiogenic polypeptide with its interactor will result in no light emission enabling identification and isolation of the responsible compound.

[0087] High-throughput drug screening techniques may also employ methods as described in WO84/03564. Small peptide test compounds synthesised on a solid substrate can be assayed through relevant angiogenic polypeptide binding and washing. The relevant bound angiogenic polypeptide is then detected by methods well known in the art. In a variation of this technique, purified angiogenic polypeptides can be coated directly onto plates to identify interacting test compounds.

[0088] An additional method for drug screening involves the use of host eukaryotic cell lines which carry mutations in any relevant angiogenic gene of the invention. The host cell lines are also defective at the polypeptide level. Other cell lines may be used where the gene expression of the relevant angiogenic gene can be regulated (i.e. over-expressed, under-expressed, or switched off). The host cell lines or cells are grown in the presence of various drug compounds and the rate of growth of the host cells is measured to determine if the compound is capable of regulating the growth of defective cells.

[0089] The angiogenic polypeptides of the present invention may also be used for screening compounds developed as a result of combinatorial library technology. This provides a way to test a large number of different substances for their ability to modulate activity of a polypeptide. The use of peptide libraries is preferred (see WO 97/02048) with such libraries and their use known in the art.

[0090] A substance identified as a modulator of polypeptide function may be peptide or non-peptide in nature. Non-peptide “small molecules” are often preferred for many in vivo pharmaceutical applications. In addition, a mimic or mimetic of the substance may be designed for pharmaceutical use. The design of mimetics based on a known pharmaceutically active compound (“lead” compound) is a common approach to the development of novel pharmaceuticals. This is often desirable where the original active compound is difficult or expensive to synthesise or where it provides an unsuitable method of administration. In the design of a mimetic, particular parts of the original active compound that are important in determining the target property are identified. These parts or residues constituting the active region of the compound are known as its pharmacophore. Once found, the pharmacophore structure is modelled according to its physical properties using data from a range of sources including x-ray diffraction data and NMR. A template molecule is then selected onto which chemical groups which mimic the pharmacophore can be added. The selection can be made such that the mimetic is easy to synthesise, is likely to be pharmacologically acceptable, does not degrade in vivo and retains the biological activity of the lead compound. Further optimisation or modification can be carried out to select one or more final mimetics useful for in vivo or clinical testing.

[0091] It is also possible to isolate a target-specific antibody and then solve its crystal structure. In principle, this approach yields a pharmacophore upon which subsequent drug design can be based as described above. It may be possible to avoid protein crystallography altogether by generating anti-idiotypic antibodies (anti-ids) to a functional, pharmacologically active antibody. As a mirror image of a mirror image, the binding site of the anti-ids would be expected to be an analogue of the original binding site. The anti-id could then be used to isolate peptides from chemically or biologically produced peptide banks.

[0092] Another alternative method for drug screening relies on structure-based rational drug design. Determination of the three dimensional structure of the polypeptides of the invention, or the three dimensional structure of the protein complexes which may incorporate these polypeptides allows for structure-based drug design to identify biologically active lead compounds.

[0093] Three dimensional structural models can be generated by a number of applications, some of which include experimental models such as x-ray crystallography and NMR and/or from in silico studies using information from structural databases such as the Protein Databank (PDB). In addition, three dimensional structural models can be determined using a number of known protein structure prediction techniques based on the primary sequences of the polypeptides (e.g. SYBYL—Tripos Associated, St. Louis, Mo.), de novo protein structure design programs (e.g. MODELER—MSI Inc., San Diego, Calif., or MOE—Chemical Computing Group, Montreal, Canada) or ab initio methods (e.g. see U.S. Pat. Nos. 5331573 and 5579250).

[0094] Once the three dimensional structure of a polypeptide or polypeptide complex has been determined, structure-based drug discovery techniques can be employed to design biologically-active compounds based on these three dimensional structures. Such techniques are known in the art and include examples such as DOCK (University of California, San Francisco) or AUTODOCK (Scripps Research Institute, La Jolla, Calif.). A computational docking protocol will identify the active site or sites that are deemed important for protein activity based on a predicted protein model. Molecular databases, such as the Available Chemicals Directory (ACD) are then screened for molecules that complement the protein model.

[0095] Using methods such as these, potential clinical drug candidates can be identified and computationally ranked in order to reduce the time and expense associated with typical ‘wet lab’ drug screening methodologies.

[0096] Compounds identified from the screening methods described above form a part of the present invention, as do pharmaceutical compositions containing these and a pharmaceutically acceptable carrier.

Pharmaceutical Preparations

[0097] Compounds identified from screening assays as indicated above can be administered to a patient at a therapeutically effective dose to treat or ameliorate a disorder associated with angiogenesis. A therapeutically effective dose refers to that amount of the compound sufficient to result in amelioration of symptoms of the disorder.

[0098] Toxicity and therapeutic efficacy of such compounds can be determined by standard pharmaceutical procedures in cell cultures or experimental animals. The data obtained from these studies can then be used in the formulation of a range of dosages for use in humans.

[0099] Pharmaceutical compositions for use in accordance with the present invention can be formulated in a conventional manner using one or more physiological acceptable carriers, excipients or stabilisers which are well known. Acceptable carriers, excipients or stabilizers are non-toxic at the dosages and concentrations employed, and include buffers such as phosphate, citrate, and other organic acids; antioxidants including absorbic acid; low molecular weight (less than about 10 residues) polypeptides; proteins, such as serum albumin, gelatin, or immunoglobulins; binding agents including hydrophilic polymers such as polyvinylpyrrolidone; amino acids such as glycine, glutamine, asparagine, arginine or lysine; monosaccharides, disaccharides, and other carbohydrates including glucose, mannose, or dextrins; chelating agents such as EDTA; sugar alcohols such as mannitol or sorbitol; salt-forming counterions such as sodium; and/or non-ionic surfactants such as Tween, Pluronics or polyethylene glycol (PEG).

[0100] The formulation of pharmaceutical compositions for use in accordance with the present invention will be based on the proposed route of administration. Routes of administration may include, but are not limited to, inhalation, insufflation (either through the mouth or nose), oral, buccal, rectal or parental administration.

Diagnostic and Prognostic Applications

[0101] Should abnormalities in any one of the angiogenic genes of the invention exist, which alter activity and/or expression of the gene to give rise to angiogenesis-related disorders, the polynucleotides and polypeptides of the invention may be used for the diagnosis or prognosis of these disorders, or a predisposition to such disorders. Examples of such disorders include, but are not limited to, cancer, rheumatoid arthritis, diabetic retinopathy, psoriasis, cardiovascular diseases such as atherosclerosis, ischaemic limb disease and coronary artery disease. Diagnosis or prognosis may be used to determine the severity, type or stage of the disease state in order to initiate an appropriate therapeutic intervention.

[0102] In another embodiment of the invention, the polynucleotides that may be used for diagnostic or prognostic purposes include oligonucleotide sequences, genomic DNA and complementary RNA and DNA molecules. The polynucleotides may be used to detect and quantitate gene expression in biopsied tissues in which abnormal expression or mutations in any one of the angiogenic genes may be correlated with disease. Genomic DNA used for the diagnosis or prognosis may be obtained from body cells, such as those present in the blood, tissue biopsy, surgical specimen, or autopsy material. The DNA may be isolated and used directly for detection of a specific sequence or may be amplified by the polymerase chain reaction (PCR) prior to analysis. Similarly, RNA or cDNA may also be used, with or without PCR amplification. To detect a specific nucleic acid sequence, direct nucleotide sequencing, reverse transcriptase PCR (RT-PCR), hybridisation using specific oligonucleotides, restriction enzyme digest and mapping, PCR mapping, RNAse protection, and various other methods may be employed. Oligonucleotides specific to particular sequences can be chemically synthesized and labelled radioactively or nonradioactively and hybridised to individual samples immobilized on membranes or other solid-supports or in solution. The presence, absence or excess expression of any one of the angiogenic genes may then be visualized using methods such as autoradiography, fluorometry, or colorimetry.

[0103] In a particular aspect, the nucleotide sequences of the invention may be useful in assays that detect the presence of associated disorders, particularly those mentioned previously. The nucleotide sequences may be labelled by standard methods and added to a fluid or tissue sample from a patient under conditions suitable for the formation of hybridisation complexes. After a suitable incubation period, the sample is washed and the signal is quantitated and compared with a standard value. If the amount of signal in the patient sample is significantly altered in comparison to a control sample then the presence of altered levels of nucleotide sequences in the sample indicates the presence of the associated disorder. Such assays may also be used to evaluate the efficacy of a particular therapeutic treatment regimen in animal studies, in clinical trials, or to monitor the treatment of an individual patient.

[0104] In order to provide a basis for the diagnosis or prognosis of an angiogenesis-related disorder associated with a mutation in any one of the angiogenic genes of the invention, the nucleotide sequence of the relevant gene can be compared between normal tissue and diseased tissue in order to establish whether the patient expresses a mutant gene.

[0105] In order to provide a basis for the diagnosis of a disorder associated with abnormal expression of any one of the angiogenic genes of the invention, a normal or standard profile for expression is established. This may be accomplished by combining body fluids or cell extracts taken from normal subjects, either animal or human, with a sequence, or a fragment thereof, encoding the relevant angiogenic gene, under conditions suitable for hybridisation or amplification. Standard hybridisation may be quantified by comparing the values obtained from normal subjects with values from an experiment in which a known amount of a substantially purified polynucleotide is used. Another method to identify a normal or standard profile for expression of any one of the angiogenic genes is through quantitative RT-PCR studies. RNA isolated from body cells of a normal individual, particularly RNA isolated from endothelial cells, is reverse transcribed and real-time PCR using oligonucleotides specific for the relevant gene is conducted to establish a normal level of expression of the gene. Standard values obtained in both these examples may be compared with values obtained from samples from patients who are symptomatic for a disorder. Deviation from standard values is used to establish the presence of a disorder.

[0106] Once the presence of a disorder is established and a treatment protocol is initiated, hybridisation assays or quantitative RT-PCR studies may be repeated on a regular basis to determine if the level of expression in the patient begins to approximate that which is observed in the normal subject. The results obtained from successive assays may be used to show the efficacy of treatment over a period ranging from several days to months.

[0107] According to a further aspect of the invention there is provided the use of an angiogenic polypeptide as described above in the diagnosis or prognosis of an angiogenesis-related disorder associated with any one of angiogenic genes of the invention, or a predisposition to such disorders.

[0108] When a diagnostic or prognostic assay is to be based upon any relevant angiogenic polypeptide, a variety of approaches are possible. For example, diagnosis or prognosis can be achieved by monitoring differences in the electrophoretic mobility of normal and mutant proteins. Such an approach will be particularly useful in identifying mutants in which charge substitutions are present, or in which insertions, deletions or substitutions have resulted in a significant change in the electrophoretic migration of the resultant protein. Alternatively, diagnosis or prognosis may be based upon differences in the proteolytic cleavage patterns of normal and mutant proteins, differences in molar ratios of the various amino acid residues, or by functional assays demonstrating altered function of the gene products.

[0109] In another aspect, antibodies that specifically bind the relevant angiogenic gene product may be used for the diagnosis or prognosis of disorders characterized by abnormal expression of the gene, or in assays to monitor patients being treated with the relevant angiogenic gene or protein or agonists, antagonists, or inhibitors thereof. Antibodies useful for diagnostic or prognostic purposes may be prepared in the same manner as described above for therapeutics. Diagnostic or prognostic assays may include methods that utilize the antibody and a label to detect the relevant protein in human body fluids or in extracts of cells or tissues. The antibodies may be used with or without modification, and may be labelled by covalent or non-covalent attachment of a reporter molecule.

[0110] A variety of protocols for measuring the relevant angiogenic polypeptide, including ELISAs, RIAS, and FACS, are known in the art and provide a basis for diagnosing altered or abnormal levels of expression. Normal or standard values for expression are established by combining body fluids or cell extracts taken from normal mammalian subjects, preferably human, with antibody to the relevant protein under conditions suitable for complex formation. The amount of standard complex formation may be quantitated by various methods, preferably by photometric means. Quantities of protein expressed in subject, control, and disease samples from biopsied tissues are compared with the standard values. Deviation between standard and subject values establishes the parameters for diagnosing disease.

[0111] Once an individual has been diagnosed or prognosed with a disorder, effective treatments can be initiated, as described above. In the treatment of angiogenesis-related diseases which are characterised by uncontrolled or enhanced angiogenesis, the expanding vasculature needs to be inhibited. This would involve inhibiting the relevant angiogenic genes or proteins of the invention that promote angiogenesis. In addition, treatment may also need to stimulate expression or function of the relevant angiogenic genes or proteins of the invention whose normal role is to inhibit angiogenesis but whose activity is reduced or absent in the affected individual.

[0112] In the treatment of angiogenesis-related diseases which are characterised by inhibited or decreased angiogenesis, approaches which enhance or promote vascular expansion are desirable. This may be achieved using methods essentially as described above but will involve stimulating the expression or function of the relevant angiogenic gene or protein whose normal role is to promote angiogenesis but whose activity is reduced or absent in the affected individual. Alternatively, inhibiting genes or proteins that restrict angiogenesis may also be an approach to treatment.

Microarray

[0113] In further embodiments, complete cDNAs, oligonucleotides or longer fragments derived from any of the polynucleotide sequences described herein may be used as probes in a microarray. The microarray can be used to monitor the expression level of large numbers of genes simultaneously and to identify genetic variants, mutations, and polymorphisms. This information may be used to determine gene function, to understand the genetic basis of a disorder, to diagnose or prognose a disorder, and to develop and monitor the activities of therapeutic agents. Microarrays may be prepared, used, and analysed using methods known in the art. (For example, see Schena et al., 1996; Heller et al., 1997).

Transformed Hosts

[0114] The present invention also provides for the production of genetically modified (knock-out, knock-in and transgenic), non-human animal models transformed with the nucleic acid molecules of the invention. These animals are useful for the study of the function of the relevant angiogenic gene, to study the mechanisms of disease as related to these genes, for the screening of candidate pharmaceutical compounds, for the creation of explanted mammalian cell cultures which express the protein or mutant protein and for the evaluation of potential therapeutic interventions.

[0115] Animal species which are suitable for use in the animal models of the present invention include, but are not limited to, rats, mice, hamsters, guinea pigs, rabbits, dogs, cats, goats, sheep, pigs, and non-human primates such as monkeys and chimpanzees. For initial studies, genetically modified mice and rats are highly desirable due to the relative ease in generating knock-in, knock-out or transgenics of these animals, their ease of maintenance and their shorter life spans. For certain studies, transgenic yeast or invertebrates may be suitable and preferred because they allow for rapid screening and provide for much easier handling. For longer term studies, non-human primates may be desired due to their similarity with humans.

[0116] To create an animal model based on any one of the angiogenic genes of the invention, several methods can be employed. These include generation of a specific mutation in a homologous animal gene, insertion of a wild type human gene and/or a humanized animal gene by homologous recombination, insertion of a mutant (single or multiple) human gene as genomic or minigene cDNA constructs using wild type or mutant or artificial promoter elements, or insertion of artificially modified fragments of the endogenous gene by homologous recombination. The modifications include insertion of mutant stop codons, the deletion of DNA sequences, or the inclusion of recombination elements (lox p sites) recognized by enzymes such as Cre recombinase.

[0117] To create transgenic mice in order to study gain of gene function in vivo, any relevant angiogenic gene can be inserted into a mouse germ line using standard techniques such as oocyte microinjection. Gain of gene function can mean the overexpression of a gene and its protein product, or the genetic complementation of a mutation of the gene under investigation. For oocyte injection, one or more copies of the wild type or mutant gene can be inserted into the pronucleus of a just-fertilized mouse oocyte. This oocyte is then reimplanted into a pseudo-pregnant foster mother. The liveborn mice can then be screened for integrants using analysis of tail DNA for the presence of the relevant human angiogenic gene sequence. The transgene can be either a complete genomic sequence injected as a YAC, BAC, PAC or other chromosome DNA fragment, a cDNA with either the natural promoter or a heterologous promoter, or a minigene containing all of the coding region and other elements found to be necessary for optimum expression.

[0118] To generate knock-out mice or knock-in mice, gene targeting through homologous recombination in mouse embryonic stem (ES) cells may be applied. Knock-out mice are generated to study loss of gene function in vivo while knock-in mice allow the study of gain of function or to study the effect of specific gene mutations. Knock-in mice are similar to transgenic mice however the integration site and copy number are defined in the former.

[0119] For knock-out mouse generation, gene targeting vectors can be designed such that they delete (knock-out) the protein coding sequence of the relevant angiogenic gene in the mouse genome. In contrast, knock-in mice can be produced whereby a gene targeting vector containing the relevant angiogenic gene can integrate into a defined genetic locus in the mouse genome. For both applications, homologous recombination is catalysed by specific DNA repair enzymes that recognise homologous DNA sequences and exchange them via double crossover.

[0120] Gene targeting vectors are usually introduced into ES cells using electroporation. ES cell integrants are then isolated via an antibiotic resistance gene present on the targeting vector and are subsequently genotyped to identify those ES cell clones in which the gene under investigation has integrated into the locus of interest. The appropriate ES cells are then transmitted through the germline to produce a novel mouse strain.

[0121] In instances where gene ablation results in early embryonic lethality, conditional gene targeting may be employed. This allows genes to be deleted in a temporally and spatially controlled fashion. As above, appropriate ES cells are transmitted through the germline to produce a novel mouse strain, however the actual deletion of the gene is performed in the adult mouse in a tissue specific or time controlled manner. Conditional gene targeting is most commonly achieved by use of the cre/lox system. The enzyme cre is able to recognise the 34 base pair loxP sequence such that loxP flanked (or floxed) DNA is recognised and excised by cre. Tissue specific cre expression in transgenic mice enables the generation of tissue specific knock-out mice by mating gene targeted floxed mice with cre transgenic mice. Knock-out can be conducted in every tissue (Schwenk et al., 1995) using the ‘deleter’ mouse or using transgenic mice with an inducible cre gene (such as those with tetracycline inducible cre genes), or knock-out can be tissue specific for example through the use of the CD19-cre mouse (Rickert et al., 1997).

[0122] According to still another aspect of the invention there is provided the use of genetically modified non-human animals for the screening of candidate pharmaceutical compounds.

[0123] It will be clearly understood that, although a number of prior art publications are referred to herein, this reference does not constitute an admission that any of these documents forms part of the common general knowledge in the art, in Australia or in any other country. Throughout this specification and the claims, the words “comprise”, “comprises” and “comprising” are used in a non-exclusive sense, except where the context requires otherwise.

### BRIEF DESCRIPTION OF THE DRAWINGS

[0124] FIG. 1. Examples of the classes of expression patterns of a number of angiogenic genes during angiogenesis as confirmed by Virtual Northern expression analysis. Each blot was probed with the control GAPDH1 gene to confirm loading of uniform cDNA amounts in blot construction between the defined time points of the assay.

[0125] FIG. 2. Detailed Virtual Northern expression analysis of the BNO69 gene. The top panels indicate the level of expression of BNO69 at varying time points in the in vitro model following stimulation of human umbilical vein endothelial cells (HUVECS) with phorbol myristate acetate (PMA) plus or minus (α2β1) antibody (AC11), vascular endothelial growth factor (VEGF), basic fibroblast growth factor (bFGF) or tumour necrosis factor (TNF). The lower panel shows expression levels of BNO69 in a number of human cell lines including K562 (erythroleukaemia), KG-1a (acute myelogenous leukaemia), Jurkat (acute T cell leukaemia), HeLa (cervical adenocarcinoma), HepG2 (liver tumour), LlM12-15 (colorectal carcinoma), MDA-MB-231 (breast cancer), DU145 (prostate cancer), HEK293 (embryonic kidney), HUSMC (primary umbilical vein smooth muscle cells) ±P (PMA). HUVEC T0 and HUVEC T3 represent HUVECs harvested from the 3-D model of angiogenesis at time 0 hours and 3 hours respectively.

[0126] FIG. 3. Detailed Virtual Northern expression analysis of the BNO96 gene. The top panels indicate the level of expression of BNO96 at varying time points in the in vitro model following stimulation of human umbilical vein endothelial cells (HUVECs) with phorbol myristate acetate (PMA) plus or minus (α2β1) antibody (AC11), vascular endothelial growth factor (VEGF), basic fibroblast growth factor (bFGF) or tumour necrosis factor (TNF). The lower panel shows expression levels of BNO69 in a number of human cell lines including K562 (erythroleukaemia), KG-1a (acute myelogenous leukaemia), Jurkat (acute T cell leukaemia), HeLa (cervical adenocarcinoma), HepG2 (liver tumour), LlM12-15 (colorectal carcinoma), MDA-MB-231 (breast cancer), DU145 (prostate cancer), HEK293 (embryonic kidney), HUSMC (primary umbilical vein smooth muscle cells) ±P (PMA). HUVEC T0 and HUVEC T3 represent HUVECs harvested from the 3-D model of angiogenesis at time 0 hours and 3 hours respectively.

[0127] FIG. 4. BNO69 in vitro regulation of human umbilical vein endothelial cell (HUVEC) function using retroviral-mediated gene transfer. The proliferation of HUVECs was measured over a 3 day period by direct cell counts. The mean ±SEM is given. Over-expression of antisense BNO69 (ASBNO69R) in HUVECs inhibits their proliferation. EV: Empty vector control.

[0128] FIG. 5. BNO69 in vitro regulation of human umbilical vein endothelial cell (HUVEC) function using adenoviral-mediated gene transfer. Over-expression of antisense BNO69 (ASBNO69A) in HUVECs leads to an inhibitory effect on cell proliferation.

[0129] FIG. 6. BNO69 in vitro regulation of human umbilical vein endothelial cell (HUVEC) function using retroviral-mediated gene transfer. Cell morphology of endothelial cells retrovirally transfected with either empty vector (EV) control or antisense BNO69 (ASBNO69R) is shown.

[0130] FIG. 7. Cell proliferation assay based on the over-expression of antisense BNO96 in human umbilical vein endothelial cells (HUVECs) using adenoviral-mediated gene transfer. Cells were infected with either vector only control (EV) or antisense BNO96 (ASBNO96), and harvested 48 hours later. Cell proliferation was measured by the colorimetric MTT assay performed 3 days after cell plating (mean ±SEM, n=4).

[0131] FIG. 8. Effect on cell migration as a result of over-expression of antisense BNO96 in human umbilical vein endothelial cells (HUVECs) using adenoviral-mediated gene transfer. Cells were infected with either vector only control (EV) or antisense BNO96 (ASBNO96) and migration of cells towards either no agent (Nil) or the chemotactic stimulant fibronectin (Fn) was measured after 18-24 hours.

[0132] FIG. 9. Effect on capillary tube formation on Matrigel as a result of over-expression of antisense BNO96 in human umbilical vein endothelial cells (HUVECs) using adenoviral-mediated gene transfer. Cells were infected with either vector only control (EV) or antisense BNO96 (ASBNO96) and assayed for tube formation over a 24 hour time period. Photos were taken after 20 hours. A and B: Low power photograph of tubes; C and D: High power photograph of tubes.

[0133] FIG. 10. Effect on capillary tube formation on collagen gels as a result of over-expression of antisense BNO96 in human umbilical vein endothelial cells (HUVECs) using adenoviral-mediated gene transfer. Cells were infected with either vector only control (EV) or antisense BNO96 (ASBNO96) and assayed for tube formation over an 18-24 hour time period. Photos were taken after 3 hours as the cells were migrating through the gel. M: Migrated cell. These appear flatter and less light refractive than non-migrated cells. NM: Non-migrated cell. These cells are rounded and light refractive.

[0134] FIG. 11. Effect on tumour necrosis factor (TNF)-induced E-selectin expression as a result of over-expression of antisense BNO96 in human umbilical vein endothelial cells (HUVECs) using adenoviral-mediated gene transfer. Cells were infected with either vector only control (EV) or antisense BNO96 (ASBNO96) and grown for 48 hours. TNF was added for 4 hours prior to staining for cell surface E-selectin expression using an anti E-selectin antibody. Detection was by phycoerythrin conjugated anti mouse antibody. The mean fluorescence intensity (MFI) is given.

[0135] cDNA synthesis protocol generated a majority of full length cDNAs which were subsequently PCR amplified for cDNA subtraction.

### EXAMPLE 3

### Suppression Subtractive Hybridisation (SSH)

[0136] SSH was performed on SMART amplified cDNA in order to enrich for cDNAs that were either up-regulated or down-regulated between the cDNA populations defined by the selected time-points. This technique also allowed “normalisation” of the regulated cDNAs, thereby making low abundance cDNAs (ie poorly expressed, but important, genes) more easily detectable. To do this, the PCR-Select cDNA synthesis kit (Clontech-user manual PT3041-1) and PCR-Select cDNA subtraction kit (Clontech-user manual PT1117-1) were used based on manufacturers conditions. These procedures relied on subtractive hybridisation and suppression PCR amplification. SSH was performed between the following populations: 0-0.5 hours; 0.5-3.0 hours; 3.0-6.0 hours; 6.0-24 hours.

### EXAMPLE 4

### Differential Screening of cDNA Clones

[0137] Following SSH, the cDNA fragments were digested with EagI and cloned into the compatible unique NotI site in pBluescript KS⁺ using standard techniques (Sambrook et al., 1989). This generated forward and reverse subtracted libraries for each time period. A differential screening approach outlined in the PCR-Select Differential Screening Kit (Clontech-user manual PT3138-1) was used to identify regulated cDNAs from non-regulated ones. To do this, cDNA arrays were generated by spotting clone plasmid DNA onto nylon filters in quadruplicate. Approximately 900 individual clones were analysed by cDNA array. These arrays were subsequently probed with:
[0138] a) unsubtracted time 1 cDNA (represents mRNAs present at time 1)
[0139] b) unsubtracted time 2 cDNA (represents mRNAs present at time 2)
[0140] c) forward subtracted cDNA (represents mRNAs upregulated at time 2)
[0141] d) reverse subtracted cDNA (represents mRNAs upregulated at time 1)

[0142] All hybridisations occurred at 42° C. in ExpressHyb solution (Clontech). Membranes were washed post-hybridisation according to kit instructions.

[0143] Those cDNA clones identified to be differentially expressed based on cDNA array hybridisations were subsequently sequenced. In silico database analysis was then used to identify homology to sequences present in the nucleotide and gene databases at the National Centre for Biotechnology Information (NCBI) in order to gain information about each clone that was sequenced. Selection of clones for further analysis was based upon the predicted function as deduced from homology searches.

[0144] Tables 1 and 2 provide information on the differentially expressed clones that were sequenced. Table 1 includes those clones which represent previously uncharacterised or novel genes, while Table 2 includes clones that correspond to previously identified genes which have not before been associated with angiogenesis. Also identified were a number of genes that have previously been shown to be involved in the process of angiogenesis. The identification of these clones provides a validation or proof of principle of the effectiveness of the angiogenic gene identification strategy employed and suggests that the clones listed in Tables 1 and 2 are additional angiogenic gene candidates.

[0145] An example from Table 1 is BNO69 which encodes a novel protein of 655 amino acids. Analysis of the full-length sequence of this clone indicated the presence of a GTPase Activating Protein (GAP) domain. GAP domains are found in a class of proteins that are key regulators of GTP binding proteins that include Ras, Rho, Cdc42 and Rac GTPases. These GTPases participate in many physiological processes which include cell motility, adhesion, cytokinesis, proliferation, differentiation and apoptosis (reviewed in Van Aelst and D'Souza-Schorey, 1997; Ridley, 2001). Rho-like GTPAses cycle between an inactive GDP bound state and an active GTP bound state. The conversion between the two forms is regulated primarily by two types of proteins. They are up-regulated by the guanine exchange factors (GEFs), which enhance the exchange of bound GDP for GTP, and down-regulated by the GTPase-activating proteins (GAPS) which increase the intrinsic rate of hydrolysis of bound GTP. When loaded with GTP, Rho GTPases gain the ability to bind a set of downstream effectors, leading for example to various cytoskeletal rearrangements.

[0146] An example from Table 2 is the BNO96 gene. Sequencing of cDNA clone 23 (BNO96) established that this clone was identical to the gammal2 subunit (GNG12) of the G protein. Heterotrimeric G proteins are involved in signal transduction from cell surface receptors to cellular effectors. The G proteins are composed of alpha (α), beta (β) and gamma (γ) subunits. Upon stimulation the α subunit dissociates from the complex and both the α and the βγ subunits are able to activate multiple effectors to generate many intracellular signals.

[0147] At present 6 different β and 12 different γ subunits have been identified. Since the γγ subunits are tightly associated and form highly stable dimers, they have been considered as a functional unit to date.

[0148] GNG12 has been reported to be widely expressed and rich in fibroblasts and smooth muscle cells (Ueda et al., 1999). GNG12 is a substrate for protein kinase C and is phosphorylated following stimulation with agents such as PMA, LPA (lysophosphatidic acid), growth factors and serum (Asano et al., 1998). GNG12 is also associated with F-actin (Ueda et al., 1997).

[0149] Previous reports have shown that over-expression of GNG12 alone has no effect on NIH-3T3 fibroblasts. However, over-expression of the β₁γ₁₂ dimer induced cell rounding, disruption of stress fibres and enhancement of cell migration. Phosphorylation of GNG12 is required for its effects on cell motility (Yasuda et al., 1998).

[0150] Based on available information regarding the BNO69 and BNO96 genes, and given that both genes have been shown to be differentially expressed during angiogenesis in the present invention, there is the suggestion that the these genes have features consistent with them performing functions associated with angiogenesis and for this reason they were analysed further.

### EXAMPLE 5

### Virtual Northern Blot Analysis

[0151] Before functional analysis of selected clones, the differential expression observed from the cDNA array analysis of the clones listed in Tables 1 and 2 (including BNO69 and BNO96) was confirmed by Virtual Northern analysis.

[0152] Amplified cDNA from each time point was electrophoresed on an agarose/EtBr gel and the cDNA was transferred to a nylon membrane using Southern transfer according to established techniques (Sambrook et al., 1989). All cDNA clone inserts were labelled with ³²P using the Megaprime DNA labelling system (Amersham Pharmacia Biotech) and hybridisations were performed in ExpressHyb solution (Clontech) according to manufacturers specifications.

[0153] Based on the results, clones were grouped according to their type of regulation pattern (FIG. 1, and Tables 1 and 2). Of the 20 novel genes identified to date, 9 were confirmed to be regulated during angiogenesis, 4 gave an undetectable signal on Virtual Northern blots and the remaining clones did not indicate regulation of expression based on the Virtual Northern result. Similarly, of the 94 known genes not previously associated with angiogenesis, 59 were confirmed to be differentially regulated from the angiogenesis model. Those clones that did not display differential expression (Class F) or did not give detectable results on Virtual Northerns may still be involved in angiogenesis however further characterisation is needed.

### EXAMPLE 6

### Cell and Stimulation Specificity

[0154] To further characterise the differentially expressed clones and confirm their role in angiogenesis, virtual Northern blots were again used to determine the cell type expression specificity and their stimulation in monolayer cultures with specific growth factors. Endothelial cells were plated on a 2-dimensional (2-D) collagen matrix and were stimulated for 0.5, 3.0, 6.0 and 24 hours with vascular endothelial growth factor (VEGF), basic fibroblast growth factor (FGF), tumour necrosis factor a (TNFα), PMA+ACII, or PMA, alone. Primary cultures of endothelial cells, fibroblasts, smooth muscle cells, together with tumour cell lines were collected. RNA was prepared from all cells and the SMART-PCR cDNA synthesis kit (Clontech-user manual PT3041-1) was used to generate cDNA for virtual Northern preparation. Prepared blots were then probed for regulation of the specific angiogenic gene of interest. Results are shown in Tables 1 and 2.

[0155] Of the clones so far analysed, all were confirmed to be expressed in endothelial cells. Of those clones listed in Table 1, three of the six clones analysed for signal specificity were shown to be influenced by the presence of VEGF, FGF and PMA. Two clones showed no response following the stimulation of endothelial cells in culture and the remaining clone showed that the differential expression was specific for the 3-dimensional and not 2-dimensional collagen gels. Of those clones listed in Table 2, two of the six clones analysed for signal specificity were shown to be influenced by the presence of VEGF and FGF and one clone was influenced by the presence of PMA only. One clone showed no response following the stimulation of endothelial cells in culture and the remaining two clones showed that the differential expression was specific for the 3-dimensional and not 2-dimensional collagen gels.

[0156] FIGS. 2 and 3 provide a detailed summary of the cell and stimulation specificity results for the BN069 and BNo96 genes respectively. These results indicate that both genes are up-regulated at the 3-hour time-point of the 3-dimensional (3-D) in vitro model. While the BN069 gene is expressed in response to FGF, VEGF and PMA, expression of the BN096 gene occurs only in response to PMA. Both genes are expressed in several cell types including endothelial cells.

### EXAMPLE 7

### Analysis of the Angiogenic Genes

[0157] The genes identified by this study to be implicated in the angiogenesis process, as listed in Tables 1 and 2, may be used for further studies in order to confirm their role in angiogenesis in vitro. To do this, full-length coding sequences of the genes can be cloned into suitable expression vectors such as retroviruses or adenoviruses in both sense and anti-sense orientations and used for infection into endothelial cells (ECs). Retrovirus infection gives long-term EC lines expressing the gene of interest whereas adenovirus infection gives transient gene expression. Infected cells can then be subjected to a number of EC assays including proliferation and capillary tube formation to confirm the role of each gene in angiogenesis.

[0158] As an example, the effect of BN069 and BN096 on in vitro regulation of EC function has been determined and is described below.

In Vitro Regulation of EC Function—BN069

[0159] The effect of BN069 on endothelial cell function and angiogenesis involved transfection of the antisense of BN069 into endothelial cells by retroviral or adenoviral mediated gene transfer. Human umbilical vein endothelial cells (HUVECs) at passage 1 or 2 were used for the overexpression experiments. Initially, the BNO69 gene was cloned into the replication defective retrovirus pRufNeo (Rayner and Gonda, 1994). The commercially available cell line BING was used for transfection and production of viral supernatant. HUVEC clones infected with the retrovirus and expressing the antisense BNO69 gene were selected for neo resistance using G418 and pooled together for further growth and analysis. The proliferation of the pooled clones was measured over a 3 day period by direct cell counts. Results of these experiments indicated that cells that had been infected with the antisense construct of BNO69 showed a decrease in their proliferative potential (FIG. 4).

[0160] Subsequent experiments using adenoviral-mediated expression of antisense BNO69 in HUVECs showed a similar effect on cell proliferation as that observed in the retroviral system. HUVECs were infected with either vector only control or antisense BNO69 and were harvested 24 hours after infection and plated onto microtitre plates in complete growth medium. Cell proliferation was measured by the colorimetric MTT assay as described previously (Xia et al., 1999). The assay was performed 3 days after cell plating. Results of these experiments showed that the proliferation of HCs was inhibited by adenoviral-mediated expression of antisense BNO69 (FIG. 5).

[0161] In addition, in both the retrovirus and adenovirus infection systems, a major feature of the cells infected with the antisense construct to BNO69 was the change in cell morphology. Cells appeared enlarged in size, with an increase in the extent of the cytoplasm (FIG. 6). The increase in cell size was confirmed by analysis on a fluorescence activated cell sorter where a measurement of both the forward scatter and side scatter gives information on the size and granularity of the cells respectively. In both retrovirus and adenovirus systems these parameters were changed. In retrovirus infected cells, forward scatter was 385 (EV) and 522 (ASBNO69R) while side scatter measured 289 (EV) and 508 (ASBNO69R). In the adenovirus infected cells the measurements for forward scatter were, 444 (EV) and 533 (ASBNO69R) while side scatter measured 417 (EV) and 500 (ASBNO69R).

In Vitro Regulation of EC Function—BNO96

[0162] The effect of BNO96 on endothelial cell function and angiogenesis involved transfection of the antisense of BNO96 into endothelial cells by adenoviral gene transfer. Initially, antisense BNO96 was produced as a recombinant adenoviral plasmid employing homologous recombination in bacteria (essentially as outlined in http://coloncancer.org/protocol.htm). The resultant plasmids were transfected into the mammalian packaging cell line 293 for expansion of virus, and the virus was subsequently purified by caesium chloride gradients. Transfection efficiency was assessed by green fluorescent protein and plaque forming units as given in the protocol above.

[0163] Initially, the effect on endothelial cell proliferation of antisense BNO96 was determined. Human umbilical vein endothelial cells (HUVECs) were infected with either vector only control or antisense BNO96 and were harvested 48 hours later. Cell proliferation was measured by the colorimetric MTT assay as described previously (Xia et al., 1999). The assay was performed 3 days after cell plating (mean ±SEM, n=4). Infection of HUVECs with antisense BNO96 was found to inhibit cell proliferation (FIG. 7) when cells were cultured in full growth medium.

[0164] Another feature of the angiogenic in vitro model is the migration of endothelial cells into the matrix. To test the effect that BNO96 plays on this process, cell migration experiments were next conducted. Human umbilical vein endothelial cells (HUVECs) were infected with either vector only control or antisense BNO96 and migration of cells towards either no agent or the chemotactic stimulant fibronectin was measured. The migration assay was performed as previously described (Leavesley et al., 1993). Briefly, fibronectin at 50 μg/ml was coated on the under-side of 8.0 μm Transwell filters to act as a chemotactic gradient. Cell migration was assessed after 18-24 hours. Results from these experiments showed that antisense BNO96-infected cells were inhibited from migrating towards fibronectin as a chemotactic stimulant (FIG. 8).

[0165] An essential feature of the angiogenic process is the formation of capillary tubes. The role that BNO96 plays in this process was measured using the Matrigel and collagen gel models. In the Matrigel system, human umbilical vein endothelial cells (HUVECs) were infected with either vector only control or antisense BNO96 and assayed for tube formation as previously described (Cockerill et al., 1994). Briefly, 140 μl of 3×10⁵ cells/ml were plated onto the Matrigel and cell reorganisation and tube formation was assessed over a 24 hour time period. The antisense BNO96-infected cells failed to make capillary tubes in the Matrigel capillary tube assay (FIG. 9).

[0166] In the collagen gel model, HUVECs were again infected with either vector only control or antisense BNO96 and assayed over an 18-24 hour time period for tube formation as previously described (Gamble et al., 1993). Expression of antisense BNO96 resulted in inhibition of cell migration (and subsequent tube formation) into the collagen gel (FIG. 10).

[0167] The next experiment addressed the question of whether the inhibition of BNO96 produces endothelial cell changes that are specific for functions associated with angiogenesis. E-selectin is an endothelial specific adhesion molecule that is induced by inflammatory cytokines such as TNF and IL-1 and mediates neutrophil-endothelial cell interactions. The effect on E-selectin expression as a result of over-expression of antisense BNO96 in human umbilical vein endothelial cells (HUVECs) was therefore determined. Methods used were as described in Litwin et al (1997). Briefly, HUVECs were infected with either vector only control or antisense BNO96 and grown for 48 hours. Following this, cells were transferred to 24-well trays and incubated overnight. Tumour necrosis factor (TNF) at 0.5 ng/ml was added for 4 hours prior to staining for cell surface E-selectin expression using an anti E-selectin antibody. Detection was by phycoerythrin conjugated anti mouse antibody. The result of these experiments showed that cells over-expressing the antisense BNO96 gene still responded in a normal fashion to the pro-inflammatory stimulant, tumour necrosis factor, to induce the adhesion molecule E-selectin (FIG. 11). This suggests that the effect of antisense BNO96 on endothelial cell function is selective.

[0168] The capacity of antisense BNO96 to inhibit cell proliferation, migration and capillary tube formation but not TNF induced E-selectin expression may suggest that knockdown of the BNO96 gene specifically affects the angiogenic capacity of endothelial cells. Other cell functions such as their ability to participate in inflammatory reactions would appear to be normal (as far as those measured to date). The BNO96 gene may therefore play a defining role in the angiogenesis process and is a target for the development of therapeutics for the treatment of angiogenesis-related pathologies.

Protein Interaction Studies

[0169] The ability of any one of the angiogenic proteins of the invention, including BNO69 and BNO96, to bind known and unknown proteins can be examined. Procedures such as the yeast two-hybrid system are used to discover and identify any functional partners. The principle behind the yeast two-hybrid procedure is that many eukaryotic transcriptional activators, including those in yeast, consist of two discrete modular domains. The first is a DNA-binding domain that binds to a specific promoter sequence and the second is an activation domain that directs the RNA polymerase II complex to transcribe the gene downstream of the DNA binding site. Both domains are required for transcriptional activation as neither domain can activate transcription on its own. In the yeast two-hybrid procedure, the gene of interest or parts thereof (BAIT), is cloned in such a way that it is expressed as a fusion to a peptide that has a DNA binding domain. A second gene, or number of genes, such as those from a cDNA library (TARGET), is cloned so that it is expressed as a fusion to an activation domain. Interaction of the protein of interest with its binding partner brings the DNA-binding peptide together with the activation domain and initiates transcription of the reporter genes. The first reporter gene will select for yeast cells that contain interacting proteins (this reporter is usually a nutritional gene required for growth on selective media). The second reporter is used for confirmation and while being expressed in response to interacting proteins it is usually not required for growth.

[0170] The nature of the interacting genes and proteins can also be studied such that these partners can also be targets for drug discovery.

Structural Studies

[0171] Recombinant angiogenic proteins of the invention can be produced in bacterial, yeast, insect and/or mammalian cells and used in crystallographical and NMR studies. Together with molecular modeling of the protein, structure-driven drug design can be facilitated.

TABLE 1
Novel Angiogenesis Genes

| | Time Course | Signal | Cell Type | Virtual | | UniGene Cluster | SEQ ID |
|---|---|---|---|---|---|---|---|
| Gene | Subtraction¹ | Specificity² | Specificity³ | Northern⁴ | Homology Details | Number | Numbers |
| BNO69 | 0.5-3 | V/F/P | S | B | Hypothetical GAP domain containing protein | Hs 93589 | 1, 115 |
| BNO71 | 3.0-6.0 | V/F/P | M | B | LUZP—leucine zipper protein. Putative | Hs 334673 | 2, 116 |
| | | | | | transcription factor | | |
| BNO72 | 0.5-3.0 | 3-D v,weak | | B | No EST matches | None | 3 |
| BNO73 | 0.5-3.0 | V/F/P | | B | ESTs | Hs 315562 | 4 |
| BNO77 | 0.5-3.0 | NR | | C | Archease-like protein | Hs 292812 | 5, 117 |
| BNO79 | 0.5-0 | | | E? | CRELD1 (Cysteine-rich with EGF-like | Hs 9383 | 6, 118 |
| | | | | | domains 1) | | |
| BNO82 | 0.5-3.0 | NR | M | E? | Hypothetical protein | Hs 172069 | 7, 119 |
| BNO83 | 3.0-6.0 | | | E (↑6 hr) | No EST matches | None | 8 |
| BNO84 | 3.0-6.0 | | | E (↓6 hr) | EST | None | 9 |
| BNO85 | 0-0.5 | | | undetectable | No EST matches | None | 10 |
| BNO86 | 0.5-3.0 | | | undetectable | EST | None | 11 |
| BNO87 | 0-0.5 | | | undetectable | No EST matches | None | 12 |
| BNO88 | 0-0.5 | | | undetectable | Hypothetical protein | Hs 4863 | 13, 120 |
| BNO89 | 0.5-3.0 | | | F | No EST matches | None | 14 |
| BNO90 | 0-0.5 | | | F | ESTs | Hs 28893 | 15, 121 |
| BNO92 | 3.0-6.0 | | | F | HMGE(GrpE-like protein cochaperone) | Hs 151903 | 16, 122 |
| BNO94 | 0-0.5 | | | F | KIAA0678 | Hs 12707 | 17, 123 |
| BNO95 | 0-0.5 | | | F | Hypothetical protein | Hs 17283 | 18, 124 |
| BNO160 | 0-0.5 | | | | EST, Moderately similar to GA15_HUMAN | Hs 335776 | 19 |
| | | | | | Growth arrest and DNA-damage-inducible protein | | |
| | | | | | GADD153 (DNA-damage inducible transcript 3) | | |
| | | | | | (DDIT3) (C/EBP-homologous protein) (CHOP) | | |
| BNO174 | 0-0.5 | | | L | KIAA0251 | Hs 343566 | 20, 125 |

Note:
¹The time period in which isolated clones were obtained and the direction of subtraction;
²Response to VEGF (V), bFGF (F), PMA (P) on 2-dimensional collagen gels. Response specific to 3-dimensional (3-D) not 2-dimensional collagen gels. No response (NR);
³Expression in many (M) or several (S) cell types.
⁴Specifically relates to the tube and lumen forming assay on 3-dimensional collagen. Class B: up at 3 hours; Class C: down at 0.5 hours; Class E: other regulation patterns; Class F: not regulated; Class L: Virtual Northern limited to 0 and 0.5 hour time points only, but no regulation.

[0172] TABLE 2
Genes with a Previously Unknown Role in Angiogenesis

| | | | | | | UniGene | |
|---|---|---|---|---|---|---|---|
| | Time Course | Signal | Cell Type | Virtual | | Cluster | SEQ ID |
| BNO # | Subtraction¹ | Specificity² | Specificity³ | Northern⁴ | Homology Details | Number | Numbers |
| BNO65 | 0-0.5 | | | A | SDF-2 (Stromal cell-derived factor 2) | Hs 118684 | 21, 126 |
| BNO66 | 0-0.5 | | | A | PRO1992 (Similar to arginyl-tRNA synthetase) | Hs 15395 | 22, 127 |
| BNO67 | 0.5-0 | | | A | Putative protein (Thioredoxin related protein) | Hs 6101 | 23, 128 |
| BNO70 | 0-0.5 | V/F | | B | BRG1-binding protein ELD/OSA1 | Hs 73287 | 24, 129 |
| BNO74 | 3.0-6.0 | | | B | SET domain-containing protein 7 | Hs 78521 | 25, 130 |
| BNO75 | 3.0-6.0 | | | B? (weak) | VPS35 (Vacuolar protein sorting 35) | Hs 264190 | 26, 131 |
| BNO76 | 3.0-6.0 | | | C | EBRP (Emopamil binding related protein, | Hs 298490 | 27, 132 |
| | | | | | delta8-delta7 sterol isomerase related protein) | | |
| BNO78 | 0-0.5 | | | E (↓24 hr) | CPSF2 (Cleavage and polyadenylation | Hs 224961 | 28, 133 |
| | | | | | specific factor 2) | | |
| BNO80 | 0.5-0 | | | E | Hypothetical protein | Hs 323193 | 29, 134 |
| BNO91 | 3.0-6.0 | | | F | NADH4 (Mitochondrial gene) | None | 30, 135 |
| BNO93 | 0-0.5 | | | F | SGPL1 (Sphingosine-1-phosphate lyase 1) | Hs 186613 | 31, 136 |
| BNO381 | 0-0.5 | | | F | COBW-like protein | Hs 7535 | 32, 137 |
| BNO96 | 0.5-0 | P | S | B | GNG12 (G-coupled receptor protein γ₁₂ subunit) | Hs 118520 | 33, 138 |
| BNO97⁵ | 0-0.5 | | | A | SDFR1 (Stromal cell-derived factor receptor 1) | Hs 6354 | 34, 139 |
| BNO98 | 0-0.5 | V/F P? | | B | RYBP (Ring1 and YY1 binding protein) | Hs 7910 | 35, 140 |
| BNO99⁵ | 0.5-0 | NR | | C | BMP2 (Bone morphogenic protein 2) | Hs 73853 | 36, 141 |
| BNO101^{5,6} | 3-6, 0-0.5 | | | A | TCEBIL (Transcription elongation factor B (SIII), | Hs 171626 | 37, 142 |
| | | | | | polypeptide 1-like) | | |
| BNO102 | 0-0.5 | | | A | PSME2 (Proteosome activator subunit 2 - | Hs 179774 | 38, 143 |
| | | | | | PA28beta) | | |
| BNO103^{5,6} | 0-0.5, 3.0-6.0, | | | A | FTL (Ferritin, light polypeptide) | Hs 11134 | 39, 144 |
| | 0.5-0 | | | | | | |
| BNO104 | 3-6 | | | A | ITCH (Itchy homolog E3 ubiquitin protein ligase) | Hs 98074 | 40, 145 |
| BNO105 | 3-6 | | | A | ENO1-alpha (Enolase 1 alpha) | Hs 254105 | 41, 146 |
| BNO106 | 0.5-3 | | | A | HNRPH2 (Heterogeneous nuclear | Hs 278857 | 42, 147 |
| | | | | | ribonucleoprotein H2) | | |
| BNO107 | 0-0.5 | | | A | UNR (NRAS-related gene) | Hs 69855 | 43, 148 |
| BNO108^{5,6} | 0-0.5, 0.5-3.0, | | | A (↑24 hr) | COX-1 (Cytochrome oxidase 1 small subunit - | None | 44, 149 |
| | 6.0-24 | | | | Mitochondrial gene) | | |
| BNO111 | 3-6 | | | A/(B/D) | ZFP36L2 (Zinc finger protein 36, C3H type-like 2) | Hs 78909 | 45, 150 |
| BNO112 | 6-24 | | | A (↑24 hr) | CALM1 (Calmodulin-1) | Hs 177656 | 46, 151 |
| BNO114 | 6-24 | | | A | CYPIBI (Cytochrome P450, subfamily I | Hs 154654 | 47, 152 |
| | | | | | (dioxin-inducible), polypeptide 1) | | |
| BNO115 | 3-6 | | | A | UGTREL1 (UDP-galactose transporter related) | Hs 154073 | 48, 153 |
| BNO116 | 0.5-3 | | | A (↑24 hr) | MCPR (Anaphase-promoting complex 1; meiotic | Hs 40137 | 49, 154 |
| | | | | | checkpoint regulator) | | |
| BNO120 | 3-6 | | | B | GLO1 (Glyoxalase 1) | Hs 75207 | 50, 155 |
| BNO122 | 0.5-3 | | | B? | RPL15 (Ribosomal protein L15) | Hs 74267 | 51, 156 |
| BNO123 | 3-6 | | | B | SF3B1 (splicing factor 3b, subunit 1) | Hs 334826 | 52, 157 |
| BNO124 | 0.5-3 | | | B | AKAP12 (A kinase (PRKA) anchor protein | Hs 788 | 53, 158 |
| | | | | | (gravin) 12) | | |
| BNO128 | 6-24 | | | B | HSPA8 (Heat shock 70 kD protein 8) | Hs 180414 | 54, 159 |
| BNO130 | 0.5-3 | | | B | LIPG (Endothelial lipase) | Hs 65370 | 55, 160 |
| BNO131 | 0-0.5 | 3-D | | C | PX19 like (Px19-like protein) | Hs 279529 | 56, 161 |
| BNO132 | 0.5-0 | | | C | PDCD6 (Programmed cell death 6) | Hs 80019 | 57, 162 |
| BNO133 | 0.5-3 | | | C | SDPR (Serum deprivation response - | Hs 26530 | 58, 163 |
| | | | | | phosphatidylserine binding protein) | | |
| BNO134 | 0.5-0 | | | C | GPI (Glucose phosphate isomerase) | Hs 279789 | 59, 164 |
| BNO135 | 0.5-0 | | | C | COX-3 (Cytochrome oxidase 3 subunit - | None | 60, 165 |
| | | | | | Mitochondrial gene) | | |
| BNO137 | 3-6 | 3-D | M | D | PTRF (Polymerase I and transcript release factor) | Hs 29759 | 61, 166 |
| BNO140 | 3-6 | | | D | CCND2 (Cyclin D2) | Hs 75586 | 62, 167 |
| BNO141 | 0.5-0 | | | D | GOLGA2 (Golgi autoantigen, golgin subfamily a, 2) | Hs 24049 | 63, 168 |
| BNO142 | 3-6 | | | E(↑6 hr) | RPL11(Ribosomal protein L11) | Hs 179943 | 64, 169 |
| BNO144⁵ | 0.5-0, 0-0.5 | | | E(↓24 hr) | EEF1A1 (Eukaryotic translation elongation factor | Hs 181165 | 65, 170 |
| | | | | | 1 alpha 1) | | |
| BNO145 | 0.5-3 | | | E (↑6 hr) | ATP1A1 (ATPase, Na+/K+ transporting, | Hs 76549 | 66, 171 |
| | | | | | alpha 1 polypeptide) | | |
| BNO146 | 0.5-3 | | | E (↑6 hr) | TAX1BP1 (Tax1 (human T-cell leukemia virus | Hs 5437 | 67, 172 |
| | | | | | type I) binding protein 1) | | |
| BNO147 | 0.5-3 | | | E? | KARP-1BP3 (Ku86 Autoantigen Related Protein | Hs 25132 | 68, 173 |
| | | | | | binding protein 3) | | |
| BNO148 | 3-6 | | | E (↓24 hr) | RPS6 (Ribosomal protein S6 subunit) | Hs 350166 | 69, 174 |
| BNO149 | 6-24 | | | E (↓6 hr) | MRPL22 (Mitochondrial ribosomal protein L22) | Hs 41007 | 70, 175 |
| BNO150 | 3-6 | | | E (↑6 hr) | BAZ2B (Bromodomain adjacent to zinc finger | Hs 8383 | 71, 176 |
| | | | | | domain, 2B) | | |
| BNO151 | 3-6 | | | E (↑24 hr) | TEGT (Testis enhanced gene transcript - BAX | Hs 74637 | 72, 177 |
| | | | | | inhibitor 1) | | |
| BNO152 | 0-0.5 | | | E (↑6 hr) | TDE1 (Tumor differentially expressed 1) | Hs 272168 | 73, 178 |
| BNO153 | 0-0.5 | | | E (↑24 hr) | RPA2 (Replication protein A2) | Hs 79411 | 74, 179 |
| BNO154 | 0-0.5 | | | E (↓24 hr) | PABPC1 (Poly(A) binding protein, cytoplasmic 1) | Hs 172182 | 75, 180 |
| BNO155 | 0.5-0 | | | E | RPS13 (Ribosomal protein S13) | Hs 165590 | 76, 181 |
| BNO156 | 0.5-0 | | | E | TCP1 (T-complex 1) | Hs 4112 | 77, 182 |
| BNO157 | 0.5-0 | | | E | RNASE1 (Ribonuclease, RNase A family, 1) | Hs 78224 | 78, 183 |
| BNO158 | 0-0.5 | | | L | SNX5 (Sorting nexin 5) | Hs 13794 | 79, 184 |
| BNO159 | 0.5-0 | | | L? | NP220 (NP220 nuclear protein) | Hs 169984 | 80, 185 |
| BNO161 | 0-0.5 | | | | DDX15 (DEAD/H (Asp-Glu-Ala-Asp/His) box | Hs 5683 | 81, 186 |
| | | | | | polypeptide 15) | | |
| BNO162 | 0.5-3 | | | | RPL28 (Ribosomal protein L28) | Hs 4437 | 82, 187 |
| BNO163 | 0.5-3 | | | | UBE2L3 (Ubiquitin-conjugating enzyme E2L3) | Hs 108104 | 83, 188 |
| BNO164 | 3-6 | | | | CYTB (Cytochrome b - Mitochondrial gene) | None | 84, 189 |
| BNO166 | 0-0.5 | | | ? | MPHOSPH6 (M-phase phosphoprotein 6) | Hs 152720 | 85, 190 |
| BNO167⁵ | 0-0.5 | | | | SSBP2 (Single-stranded DNA binding protein 2) | Hs 169833 | 86, 191 |
| BNO168 | 0.5-0 | | | | NADH1 (NADH dehydrogenase subunit 1 - | None | 87, 192 |
| | | | | | Mitochondrial gene) | | |
| BNO169 | 0.5-3 | | | U | PHF3 (PHD finger protein 3) | Hs 78893 | 88, 193 |
| BNO170⁵ | 0-0.5, 0.5-0 | | | U | ICMT (Isoprenylcysteine carboxyl methyltransferase) | Hs 183212 | 89, 194 |
| BNO171 | 0-0.5 | | | L | HCFCI (Host cell factor CI - VP16-accessory protein) | Hs 83634 | 90, 195 |
| BNO173 | 0-0.5 | | | L | QKI7/7B (QKI Homolog of mouse quaking QKI - KH | Hs 15020 | 91, 196 |
| | | | | | domain RNA binding protein) | | |
| BNO175 | 0.5-0 | | | L | S100A13 (S100 calcium binding protein A13) | Hs 14331 | 92, 197 |
| BNO176 | 0.5-0 | | | L? | CGI-99 protein | Hs 110803 | 93, 198 |
| BNO177 | 0-0.5 | | | L? | EXTI (Exostoses (multiple) I) | Hs 184161 | 94, 199 |
| BNO179 | 0.5-0 | | | | TI-227H (Mitochondrial gene) | None | 95 |
| BNO180 | 0.5-0 | | | | KPNA2 (Karyopherin alpha 2 (RAG cohort 1 - | Hs 159557 | 96, 200 |
| | | | | | importin alpha 1) | | |
| BNO181⁵ | 0.5-3 | | | | RPS9 (Ribosomal protein S9) | Hs 180920 | 97, 201 |
| BNO182 | 3-6 | | | | NCBP2 (Nuclear cap binding protein subunit 2) | Hs 240770 | 98, 202 |
| BNO183 | 3-6 | | | | S12 rRNA (Mitochondrial gene) | None | 99 |
| BNO366 | 3-6 | | | F | ATP synthase 6 (Mitochondrial gene) | None | 100, 203 |
| BNO367 | 3-6 | | | F | HSP105 (Heat shock protein 105) | Hs 36927 | 101, 204 |
| BNO368 | 0.5-0 | | | L? | PROXI (Prospero-related homeobox I) | Hs 159437 | 102, 205 |
| BNO369⁵ | 6-24, 0.5-0 | | | C/F? | ACTB (actin, beta) | Hs 288061 | 103, 206 |
| BNO370 | 6-24 | | | F | TMSB4X (Thymosin, beta 4 X chromosome) | Hs 75968 | 104, 207 |
| BNO371⁵ | 3-6, 0.5-0 | | | F | 16S rRNA (Mitochondrial gene) | None | 105 |
| BNO373 | 3-6 | | | F | APLP2 (Amyloid beta (A4) precursor-like protein 2) | Hs 279518 | 106, 208 |
| BNO374 | 0-0.5 | | | F | EPLIN beta (Epithelial protein lost in neoplasm beta) | Hs 10706 | 107, 209 |
| BNO375 | 0-0.5 | | | F | EIF3S9 (Eukaryotic translation initiation factor 3 | Hs 57783 | 108, 210 |
| | | | | | subunit 9) | | |
| BNO376 | 0.5-0 | | | F | PSMC1 (Proteasome 26S subunit, ATPase, 1) | Hs 4745 | 109, 211 |
| BNO377 | 0-0.5 | | | F | TCTA (T-cell leukemia translocation altered gene) | Hs 250894 | 110, 212 |
| BNO378 | 0.5-0 | | | F | NTF2 (Nuclear transport factor 2) | Hs 151734 | 111, 213 |
| BNO379 | 3-6 | | | F | MLC-B (Myosin regulatory light chain) | Hs 180224 | 112, 214 |
| BNO380 | 0-0.5 | | | F | CHRNAI (nicotinic acetylcholine receptor | Hs 2266 | 113, 215 |
| | | | | | alpha 1 subunit) | | |
| BNO382 | 0-0.5 | | | F | MAP1B (Microtubule associated protein 1B) | Hs 103042 | 114, 216 |

Note:
¹The time period in which isolated clones were obtained and the direction of subtraction;
²Response to VEGF (V), bFGF (F), PMA (P) on 2-dimensional collagen gels. Response specific to 3-dimensional (3-D) not 2-dimensional collagen gels. No response (NR).
³Expression in several (S) cell types; expression in many (M) cell types.
⁴Specifically relates to the tube and lumen forming assay on 3-dimensional collagen. Class A: up at 0.5 hours; Class B: up at 3 hours; Class C: down at 0.5 hours; Class D: down at 3 hours; Class E: Other regulation patterns; Class F: not regulated; Class L: Virtual Northern limited to 0 and 0.5 hour time points only, but no regulation.
⁵Multiple cDNA clones were identified for this BNO gene.
⁶The multiple cDNA clones identified for this BNO gene showed regulation of expression at more than one time point of the angiogenesis model.

References

[0173] References cited herein are listed on the following pages, and are incorporated herein by this reference.
[0174] Altschul, S F. et al. (1997). Nucleic Acids Res. 25: 3389-3402.
[0175] Asano, T. et al. (1998). Eur. J. Biochem. 251 : 314-319.
[0176] Breaker, R R. and Joyce, G F. (1995). Chem. Biol. 2: 655-600.
[0177] Cockerill, G W. et al. (1994). A Survey of Cell Biol. 159: 113-160.
[0178] Cole, S P. et al. (1984). Mol. Cell Biol. 62: 109-120.
[0179] Cote, R J. et al. (1983). Proc. Natl. Acad. Sci. USA 80: 2026-2030.
[0180] Culver, K. (1996). Gene Therapy : A Primer for Physicians. Second Edition. (Mary Ann Liebert).
[0181] Folkman, J. and Haudenschild, C. (1980). Nature (Lond.) 288: 551-556.
[0182] Friedman, T. (1991). In Therapy for Genetic Diseases. (T Friedman (Ed) Oxford University Press. pp 105-121.
[0183] Gamble, J R. et al. (1993). J. Cell Biol. 121: 931-943.
[0184] Gamble, J R. et al. (1999). Endothelium 7: 23-34.
[0185] Gecz, J. et al. (1997). Genomics 44: 201-213.
[0186] Goldman, C K. et al. (1997). Nature Biotechnology 15: 462-466.
[0187] Haseloff, J. and Gerlach, W L. (1988). Nature 334: 585-591.
[0188] Heller, R A. et al. (1997). Proc. Natl. Acad. Sci. USA 94: 2150-2155.
[0189] Huse, W D. et al. (1989). Science 246: 1275-1281.
[0190] Kohler, G. and Milstein, C. (1975). Nature 256: 495-497.
[0191] Kozbor, D. et al. (1985). L. Immunol. Methods 81:31-42.
[0192] Leavesley, D I. et al. (1993). J. Cellular Biol. 121: 163-170.
[0193] Litwin, M. et al. (1997). J. Cell Biol. 139: 219-228.
[0194] Meyer, G T. et al. (1997). The Anatomical Record 249: 327-340.
[0195] Orlandi, R. et al. (1989). Proc. Natl. Acad. Sci. USA 86: 3833-3837.
[0196] Rayner, J R. and Gonda, T J. (1994). Mol. Cell Biol. 14: 880-887.
[0197] Rickert, R C. et al. (1997). Nucleic Acids Res. 25: 1317-1318.
[0198] Ridley, A J. (2001). Trends Cell Biol. 11: 471-477.
[0199] Sambrook, J. et al. (1989). Molecular cloning: a laboratory manual. Second Edition. (Cold Spring Harbour Laboratory Press, New York).
[0200] Scharf, D. et al. (1994). Results Probl. Cell Differ. 20: 125-162.
[0201] Schena, M. et al. (1996). Proc. Natl. Acad. Sci. USA 93: 10614-10619.
[0202] Schwenk, F. et al. (1995). Nucleic Acids Res. 23: 5080-5081.
[0203] Ueda, H. et al. (1997). J. Cell Sci. 110 : 1503-1511.
[0204] Ueda, H. et al. (1999). J. Biol. Chem. 274 : 12124-12128.
[0205] Van Aelst, L. and D'Souza-Schorey, C. (1997). Genes Devel. 11: 2295-2322.
[0206] Winter, G. et al. (1991). Nature 349: 293-299.
[0207] Xia, P. et al. (1999). J. Biological Chem. 274: 34499-34505.
[0208] Yasuda, H. et al. (1998). J. Biol. Chem. 273: 21958-21965.

The application's sequence listing, which the Patent Office published only in electronic form, follows.

SEQUENCE LISTING (216 sequences)

SEQ ID NO: 1 - DNA, 4593 bp, Homo sapiens
gggggagtttgaagacagaaaggaaaggggagaaacctgcagagagcatcaaaggatggggggtgctataaaagaagcaggggggtcctttgaaagaaatctatcatgcactgaaatgctttctggagaaggtgccgttattttcctcccctcttgctcagatgaaaggagccagcaaggacagtcctgaaatattcctcaggggactttttgtcattgttcctctttcctcttgcacagagctatttgctgacctttccagaggaatctcagtccagctgagaagacagttcttaataaaaacaaaaaaatgcaaaaaccaattcctgctgtttgaatgggaatggtagcttgcttgctgcagttcttttcctgtgacattttggaatgtctgcagaaacttaaaaaaaagaaaaaaaaaaccttaaaaactccctggattaggcaagagaaaaggaagtttttttttgctaaacaggagtaaatgagaggtggtaacttatccctaagccaggacctggatgatcaaaaccttcaaattctagggatcagcacttcaaaaataacaagtaaacaagcatgaggagtggctgttgggtttcgctcagaggcaggttttaaaggaagccaaaaccgggttcagaacttcaggcctgtacgatgcctgaagaccggaattctggggggtgcccggctggtgccttagcctcaactcctttcatccctaaaactacatacagaagaatcaaacggtgttttagttttcggaaaggcatttttggacagaaactggaggatactgttcgttatgagaagagatatgggaaccgtctggctccgatgttggtggagcagtgcgtggactttatccgacaaagggggctgaaagaagagggtctctttcgactgccaggccaggctaatcttgttaaggagctccaagatgcctttgactgtggggagaagccatcatttgacagcaacacagatgtacacacggtggcatcacttcttaagctgtacctccgagaacttccagaaccagttattccttatgcgaagtatgaagattttttgtcatgtgccaaactgctcagcaaggaagaggaagcaggtgttaaggaattagcaaagcaggtgaagagtttgccagtggtaaattacaacctcctcaagtatatttgcagattcttggatgaagtacagtcctactcgggagttaacaaaatgagtgtgcagaacttggcaacggtctttggtcctaatatcctgcgccccaaagtggaagatcctttgactatcatggagggcactgtggtggtccagcagttgatgtcagtgatgattagcaaacatgattgcctctttcccaaagatgcagaactacaaagcaagccccaagatggagtgagcaacaacaatgaaattcagaagaaagccaccatggggctgttacagaacaaggagaacaataacaccaaggacagccctagtaggcagtgctcctgggacaagtctgagtcaccccagagaagcagcatgaacaatggatcccccacagctctatcaggcagcaaaaccaacagcccaaagaacagtgttcacaagctagatgtgtctagaagcccccctctcatggtcaaaaagaacccagcctttaataagggtagtgggatagttaccaatgggtccttcagcagcagtaatgcagaaggtcttgagaaaacccaaaccacccccaatgggagcctacaggccagaaggagctcttcactgaaggtatctggtaccaaaatgggcacgcacagtgtacagaatggaacggtgcgcatgggcattttgaacagcgacacactcgggaaccccacaaatgttcgaaacatgagctggctgccaaatggctatgtgaccctgagggataacaagcagaaagaacaagctggagagttaggccagcacaacagactgtccacctatgataatgtccatcaacagttctccatgatgaaccttgatgacaagcagagcattgacagtgctacctggtccacttcctcctgtgaaatctccctccctgagaactccaactcctgtcgctcttctaccaccacctgcccagagcaagacttttttggggggaactttgaggaccctgttttggatgggcccccgcaggacgacctttcccaccccagggactatgaaagcaaaagtgaccacaggagtgtgggaggtcgaagtagtcgtgccaccagtagcagtgacaacagtgagacatttgtgggcaacagcagcagcaaccacagtgcactgcacagtttagtttccagcctgaaacaggaaatgaccaaacagaagatagagtatgagtccaggataaagagcttagaacagcgaaacttgactttggaaacagaaatgatgagcctccatgatgaactggatcaggagaggaaaaagttcacaatgatagaaataaaaatgcgaaatgccgagcgagcaaaagaagatgccgagaaaagaaatgacatgctacagaaagaaatggagcagtttttttccacgtttggagaactgacagtggaacccaggagaaccgagagaggaaacacaatatggattcagtgagcctgctttcgcctgctgtctctgatggctctggcaaggactccagggattctggtgggatatgacttagaaccaggtggctggtcacctggatgtacagaagtctaactggtgaaggaatatcatttacagacattaaacatccatatctgcaatgtgtaccaaagttatatcatgccccataatgctactgtcaagtgttacaactggatatgtgtatatagagtagtttttcaaaagtaaactaaaaatgagaagcatatttcaagaattattttattgcaagtcttgtatttaaatgttaaatcaatatgttgttgcaatttagcttgctttcaagcttcaccccttgcacttaacataagctatttttggcattgtgttatcatcggcttattttatagatcaatatttttatttcccttttttgctgaggaaatgaagataagcaaaaatataaatatatatataaatatatgagttattaaaaccagaagaatactttgtggctgtgctgtttgtgccaatagactttgtcatgaccaaaaagagaaatgtaaatagttttataaaatacagtcgaatcaccaggaacctttgagctgcttttaaaattcttcccctggcaccactcagttttgcttttgcgaggcgatttgacataggaactttgagactccatgagaaagtccctttctgaggcccactgtctaccttgccagatcctcagtgcgtatcgccaatgcaggatgctccttagaaaagaaaaaatggtaaaggatggcatttaacgattcaggctttgaattactctgtccctctggaccgaatctctttaactgctggatagttttagaggaattctcctgctacttaggtactgggaaacaatgcttgctaaaccatgcccacgtgagcacctgtctcccactcaaacctctcccatctcccaacaactgcactttagaataccagcagtgaaatggtattactgtttccctctgagtgaaactgctagagtatatgtcacgtagtgacatttttttctcactcaggctattgccatctgggattctctccctactacagctggcaaagttggtttgcagcaagaagatagtgggagggggccaggctgcaggagaaggagaaaagtttagaagaaacaaaccattttgcttctaattttgacagtatcactttcctgttaaaacatacaataattttaaaaggtgaatgcctaaagttccaattttagcaaatatgggaacctcagcaatgctaattttctagaaaaacccagggctctttggagctagagttttgggagaacagttcttcacaataaggcaatggttttgagaggccaggcaaataatctttctcaccgtagaacaaaaagttacaaaaggcataatcggaaatagagactacatacttgagtttatggggtttgtgttgtttgaaggttcaatgcttgcatgtgtttatttattttcaagagggaaagtggtctgtactgctttcatccttgccactgtcttgcttttattttttactctcccactgagcaagcgtctgtggtcctatggtatcaaccagtatctttatagcaataatttctttaattcccttttctctctctttccaattatttaaccagttacttccacctggacatacgataggaaattcaaactcaaaatatgaaaattgatcttaataactctcccttcatatcttttcacctatttccagtccttatcatagttgataaaaacctcagactcatccagaaagctatatgatgcactagtaaaaaaaacaaagatatttaaactgcttgggttcaaatggtatacaatttgccagctgttactgaaccttctatgcataactttttttttcctctgtgcaattggaataataaaaatactactcccataaaaaaaaaaaaaaaaaaac

SEQ ID NO: 2 - DNA, 4848 bp, Homo sapiens
ggcacgagggtcgctggcagctgagcggcggaacccttcgctggcgggagcgcggttcggggccgcagaggggacattgaataaacctgagtattgtgtgcctgtattttgactgcgacctatcagatgagatcaggtcaagagacaactgcctttgaaagagagtgagtgactgtttccaaaacagcaagcatagggagagccgccggaagtattgacggaaagcttgaattacctacatgattgatgatggtctccagctgtcaaagaagattgtggttgccaagagaaaggtaaccatttctcatccccttgagtggaattggatgcctctaggagcccacattggctggcagtagacatggccgaatttacaagctacaaggagacggcctccagccgccacttgcggtttaagctacagagtctaagccgccgccttgatgagttggaggaagccacaaaaaacctccagaaagcagaggatgaactcctggatctccaggacaaggtgattcaggcagaaggtagcaactccagcatgttggcggagattgaagtgctgcgccagcgggtgctgagaattgaaggcaaagacgaggaaattaagagagcagaggatctgtgtcgtctgatgaaggagaaacttgaagaggaagaaaacctcacccgggagctgaaatctgagattgagcggcttcagaaacgaatggctgaattagagaagctagaagaggccttcagcaggagtaagaatgactgtacccagctgtgtctgagcctgaatgaggagagaaatctgaccaagaaaatctcctctgagctggaaatgctcagagtcaaagtgaaagaactagaatcttctgaggaccgcctggataaaactgagcagagtttagcgtcagagttagaaaagctgaaatcattaactctgagctttgtaagtgagagaaaatacttgaatgaaaaggagaaagaaaatgagaaattgataaaagaactcactcaaaaactagagcagaacaaaaaaatgaaccgagattatacaaggaatgcttctaatctggaaagaaatgacctacggattgaggatggcatctcttccacactgccgtccaaagaatcaagaaggaagggtggtctggactacctaaagcaggtagagaatgaaacaagaaacaaatcagaaaatgaaaagaaccgcaatcaggaagacaacaaagtcaaagaccttaaccaagagattgagaaacttaagacgcaaatcaaacactttgaatcgttggaagaagagcttaagaaaatgaagtccaaaaataacgaccttcaggataattacctaagtgaacaaaataaaaacaaattattagccagccaactggaggagataaagctacaaatcaagaaacagaaagagttagaaaatggagaggtagaaggggaagatgctttcctgtccagcaaaggcagacatgagaggactaagtttagaggccacggaagtgaagcttctgtgtccaagcacacagcgcgggaactgtctcctcagcataagcgggaacgactccggaacagggagtttgctctcaacaatgaaaactattctctgagcaacaggcaggtttcttctcccagtttcaccaacaggagggcagcaaaagcttctcacatgggggtgagtacagacagtgggactcaggagacaaagaaaactgaagaccggtttgtacccagctcctccaagagcgaagggaagaagtctagggagcagccctcagtgctgagtcgctaccccccggctgctcaggagcacagtaaagcgtggaaggggacttccaagccaggcaccgagagtggactgaagggaaaagtggagaagacaacacgaacgtttagtgacaccacccatggatctgttcccagtgacccattgggtagagctgacaaggcttctgacacctcctctgagactgtctttggcaagaggggacacgtgcttggcaacggaagtcaagtaactcaggctgcaaactctggctgttctaaggccattggagccctggcctcatctcgaagatcctcctcagaagggctctctaaaggcaaaaaggctgccaatggccttgaggctgataacagttgcccgaattccaaggctcctgttctatcgaagtatccttatagctgtagaagccaagagaacatccttcagggattttcaacctcacataaagaaggggttaatcaacctgcagcagttgtgatggaagacagcagtccgcatgaagccttgaggtgtcgagtcatcaaatccagtggcagagagaagccagactcagatgatgacttggacatagcatctcttgttactgccaagttggtaaatacaaccatcactccagagccagagcccaaaccacagcctaactctagagaaaaggctaaaacccgaggggcacctagaacctccctatttgagaatgataaagatgctggaatggagaatgaatctgtgaaatctgtcagagcctccaccaataccatggagctcccagataccaatggtgctggggtaaaaagccaaaggccctttagccccagagaggcgttgcggtctagagccatcatcaaacctgttattgttgataaggatgtgaaaaaaatcatgggaggatctggaacagagactacgttggagaaacagaaacccgtctccaaaccagggccaaacaaagtgacaagtagcattactatatatccatctgacagcagcagccccagagctgctccgggtgaggccctgagggagaggcacacatccactagcaatatccaggtggggctggcagagctcacatcagttagcaaccatgtcagctccccttttgagctctccattcacaaacatgacatcaccctgcagcttgcagaagcggagagaatggcagatgggcccctgaagaacaggccagaaacagtggtctctcggagcagcattataatcaagccatcggatcctgtggagaggaatagccatgcacctccagcggagacaatcaggtggaaaagccatagtgccccttcagaagtgggcttctcagatgccagacatgttactgtgcggaatgcctggaagagtaggcgagacttgaaatctttagaagaccccccaactcgaataggtaaaaacgtggaatctaccaatagcaatgcctacacccagaggtcttccacagacttctcagaactcgaacagcccaggtcctgcctttttgagcagggcactcgaagggtaggaccaagttcaggggatgcccctgagccctcctccagaaggacccaaagtagcctcactgtgtcagaggtgcttacccgtcggaatcgggtaggagacaccatcactgtcgcagcctggaaccactcagcaagcatggtgagttccagcctctctcccctctctcttttctccctcccttttccttctttgccttttcctttttcccctctgctctggcctgtgtgacccaggatcttgagaactgagtagaactgggttccttagagaactgttgaaaaatcaggggggtttgacctttctcctaaagaaggtttttggcagcatcactttccaaaatcccttttccaatttgttgtcttcattttgctctcgtatatgaaggtgacataaaaaggaaatctgtcttctcttcccttggtttgccagagcagctaaaggagctccccgtaggccctcagaacagcatgaaaagcacaagaagcagctgcagctgatggggagctctgggcaacaggaggaggcccggtgccctttctgtagggcacagtgagggggagccaggtcagcaagttctcggccgcctcagttagcagatcttcacaggctgctggcctctcagggatgaggagagccggggcttacactgggcctattttagataagcgtatacccaattccaagtgacactttcttttgccccccagacagctgtctgtctcatattatcagtctgagggcagggctggttcagtatagctcattacagctttgataaatccagaaccacctgccttatgtgagtgtgaggctcagggtgtcagaacagcatctggagaagcccctgggagtgtctttttgatgagaaacctgtgatgatgaaaaacttcttggacctggacacagtgctcccttctttaaaaaagcagatgactctgttaacttgaaaagccctgtgactctttacagggtacttaacactggacaaaagtacttcactacccactatcttattcagtcccttgaatatctgcctgggggcagatattatccccatttttcagatgtagaagctaagggtcagaaacacaaaatatcttacctaaggtcacccagcagaattactggaagagcgaagacttgaatccaagattcctgtctctaaatccaatgctctttctactctgctaacctttcttactcatgcctatgttattctttgatctgcatttgcttgggagaaccaaggagaatattaaaaaggtagaattctggccaggcgtggtggctcacacctgtaatcccagcactttgggaggccaaggcaggcggatcacaaggtcaggagttcaagaccagcctggacaatatagtgaaaccccgtctctactaaaaatacaaaattagctgggtgtggtggcacatgcctgtaatcgcagctactcaggaggctgaggcaggagaatcacttgaacccaggaggcggaggttgcagtgagccaagatcgcaccattgtactccagcctgggcaacaagagtgaaatgacgtctc

SEQ ID NO: 3 - DNA, 517 bp, Homo sapiens
gtacagatgtgagactataaagatgaatctgacttggcgcctgcctcaagcagcttatataagggagaagtttgtcatgcttagttcaagccttcctaaaatccaagcttctttctctttttatattacacaaaaagaaagccaaggatgcttttcttatactggtattctcagagatatgtatatttccagtagatgtaaattaccttttacataagatagtctgtgtatttctagaagaaatgaaaatggcataatatctgcaatgttggttttttgtaggataaacatttttaatgcaatattttaaaatagcattaccatgaaagaaaatacaggattcaggttgcacccatttggctaccaaattccttcttcagttttagttgaggaccaatacatgattcttgcgcgtttttttaaattaaagaataatttttatatttatcaaagtgaaacatatgcagtcttagatacatttccagcagaaatgtgcagattggcaaaagacatgtac

SEQ ID NO: 4 - DNA, 760 bp, Homo sapiens
gtactcggccgccgggcaggtactgtaacttggaatttgttctgttatgagtctatcttgaattcccatccatgaaactgtagtcaccaaaagcaacaagtattttcacatgatgtaaaagaccatactatgatggccattgctagaaattgaatcacaaataatagctaataatttttcatttttcaaaaaagatcatttggatagcagctatgtataaaatggaaaataaaaaattattctattttgcatgaatagttcagactttcccataccacagccaagcagtaactaaaattaggatcttaattttcaatgataaaaggtctgaggttcatttaattatgctcctttaacactgtctttctagatttttcacccagtattttcaaaatttgggaatgtaaacaattgatatatttattgtatgttggctagcagttcatccttctgcaaaatatgcattcagagaaatgtgaagcttgttttaatgaagacttaaaccatttgtgtcatttgtgttttcatattcaaatacaccaaattaaaattctgaacctatatttttcatcattaacttcctaatataccagaacatatacctttttcatgtaaagttggcaatgggatatggcagttttatttttgaaaaatatgtaacatgactttaatatttttatagttttcagaattagaaacataggaagggaaaatgttttaattagataagtcaactttttatgtgtctgtagtggtgtac

SEQ ID NO: 5 - DNA, 1127 bp, Homo sapiens
tttggctttttaaatatgcgatccaagcggcagggtagggactaaagtaggtcaacagccaactccgagaaaggagtgtggtcctttaagggtgtgcgccaaggggcggagtctagagcggaagtagtaactccgggccgaagtccggtggatgaagggcggaagtagagtgtctaatcctgcagtcatggcgcaggaagaggaagatgttagagattacaatttgactgaagaacagaaggcgatcaaggccaagtatccgccagtcaataggaagtacgagtatttggatcatacagcagatgtccagttacacgcatggggagatactctggaggaagcattcgagcaatgtgcaatggccatgtttggttacatgacagatactgggacagtggagcccctccaaacagtagaagtagaaacccaaggagatgacttacagtctcttctgtttcactttttggatgaatggctttataagttcagtgctgatgaattcttcataccccgggaagtgaaagtacttagcattgatcaaagaaatttcaaattacgatcaattgggtggggagaagaattttcattgtccaagcaccctcagggaacagaagtcaaagcaataacatattcagcaatgcaggtctataatgaagagaacccggaagtttttgtgatcattgacatttaagacaccaaaaaataaaagactcctacgaagaactgtttttgttttcctcttccttttgagaagacactatgaattaaattctacagcttttttttgatatatggaaatttgtagaacagaaatattttagttaaagtgtgactttcagaaagggaaaatcagggcacagccttggtctgtgttccccaaatattcacactttaaagaattcttcaaccccccaagggacagttatggtcctttgattctctgctgtggcagtaggtgtgcctcatgcccttccagtgcaatgcaagccctccagcctcaccccagagaggatcactgatgtcagcagcagcctgaggctgaatccaggttgaaagaagaataacttgaaaaaatatatttccacacacagaattttgtttttcttccaagttggttaagacatata

SEQ ID NO: 6 - DNA, 2072 bp, Homo sapiens
ggcctcgaggcaagattcggcacgaggctaattctgcggatccggcccctaatattctttatcagaccctcagacaagaggctgacttctgcccccttgtcaaggagcgaggccactttcctctccaccccatgctagcgaggataacttatttctcttctggaattgcatcttatgcgcctttccccacccatccccacagcccctgcaatacccagtttggcctcttttgcttgtaataacgcagatcccagcgccacggcaccttagaacagacctttttctttctcgcgtggggcctgactccttcagtgaagcctctccacgccctctatctgcaggtccccagcctgggtaaagatggccccatggcccccgaagggcctagtcccagctgtgctctggggcctcagcctcttcctcaacctcccaggacctatctggctccagccctctccacctccccagtcttctcccccgcctcagccccatccgtgtcatacctgccggggactggttgacagctttaacaagggcctggagagaaccatccgggacaactttggaggtggaaacactgcctgggaggaagagaatttgtccaaatacaaagacagtgagacccgcctggtagaggtgctggagggtgtgtgcagcaagtcagacttcgagtgccaccgcctgctggagctgagtgaggagctggtggagagctggtggtttcacaagcagcaggaggccccggacctcttccagtggctgtgctcagattccctgaagctctgctgccccgcaggcaccttcgggccctcctgccttccctgtcctgggggaacagagaggccctgcggtggctacgggcagtgtgaaggagaagggacacgagggggcagcgggcactgtgactgccaagccggctacgggggtgaggcctgtggccagtgtggccttggctactttgaggcagaacgcaacgccagccatctggtatgttcggcttgttttggcccctgtgcccgatgctcaggacctgaggaatcaaactgtttgcaatgcaagaagggctgggccctgcatcacctcaagtgtgtagacattgatgagtgtggcacagagggagccaactgtggagctgaccaattctgcgtgaacactgagggctcctatgagtgccgagactgtgccaaggcctgcctaggctgcatgggggcagggccaggtcgctgtaagaagtgtagccctggctatcagcaggtgggctccaagtgtctcgatgtggatgagtgtgagacagaggtgtgtccgggagagaacaagcagtgtgaaaacaccgagggcggttatcgctgcatctgtgccgagggctacaagcagatggaaggcatctgtgtgaaggagcagatcccagagtcagcaggcttcttctcagagatgacagaagacgagttggtggtgctgcagcagatgttctttggcatcatcatctgtgcactggccacgctggctgctaagggcgacttggtgttcaccgccatcttcattggggctgtggcggccatgactggctactggttgtcagagcgcagtgaccgtgtgctggagggcttcatcaagggcagataatcgcggccaccacctgtaggacctcctcccacccacgctgcccccagagcttgggctgccctcctgctggacactcaggacagcttggtttatttttgagagtggggtaagcacccctacctgccttacagagcagcccaggtacccaggcccgggcagacaaggcccctggggtaaaaagtagccctgaaggtggataccatgagctcttcacctggcggggactggcaggcttcacaatgtgtgaatttcaaaagtttttccttaatggtggctgctagagctttggcccctgcttaggattaggtggtcctcacaggggtggggccatcacagctccctcctgccagctgcatgctgccagttcctgttctgtgttcaccacatccccacaccccattgccacttatttattcatctcaggaaataaagaaaggtcttggaaagtt

SEQ ID NO: 7 - DNA, 4634 bp, Homo sapiens
gcaattgcatcatgcaagaagatgaaagctacctccttcaggttttgcgatacttgattgaatttgaacttaaagaaagtgacaaccctaggcgacttttgaggagaggaacttgtgccttcagcatcttatttaaacttttttctgaaggactgttttctgccaaacttttcctcacagccactttacatgagccaattatgcaactgcttgttgaagatgaagatcacctggaaacagatccaaacaagctaattgagaggttctctccatctcagcaggaaaaactctttggagagaagggctcagatagattcaggcaaaaagttcaagaaatggtggagtccaatgaagcaaagctagtggctttggtgaacaaatttattggttatctcaaacagaacacatattgttttccacatagtttaaggtggatcgtgtctcagatgtacaaaaccctctcctgtgtagataggctggaagttggggaggtcagggcaatgtgtactgatctcctgttggcctgcttcatttgtcctgcagttgtcaatccagaacaatatggaataatttccgatgctcctattaatgaagtagcacgatttaatctgatgcaggtaggccgccttttgcagcagttaacaatgactggctctgaagagggagatccccgaacaaagagcagccttggaaagtttgacaaaagctgtgttgccgctttccttgatgttgtgattgggggccgtgcagtggagacccctccattgtcttccgtcaatcttctggaaggattgagcagaactgtggtttatataacctacagtcagcttattactctggtggattttatgaagagtgtgatgtctggagatcaactgagagaagatagaatggctcttgacaatttattggcaaacctacccccggccaagccaggaaaaagtagcagtttagaaatgactccctacaatacacctcagctatctccagcaaccactccagcaaataaaaagaatcgattacctatagcaactcggagcagaagccgcaccaatatgctaatggacctacatatggaccatgaaggatcatctcaagaaaccatccaggaggtgcaaccagaagaggtgttggtcatttccttaggtacaggtccccagcttactccagggatgatgtcaggaaatgaggtcctaaacatgcagctttcggatggaggacaaggagatgtccctgttgatgaaaacaaactccatggtaaacctgataaaaccttgcgcttttccctctgcagtgataatctggaaggaatatctgaaggtccttcaaatcgctccaattcagtgtcctccctagacctagaaggagagtctgtgtcagaacttggagcaggaccttctggcagtaatggagttgaagctctacagctgttagaacatgagcaagctacaacacaggataaccttgatgataagctaaggaagtttgaaattcgtgacatgatgggattaacagatgatagggacatatcagaaacagtgagtgagacctggagtacagacgtcttgggaagtgactttgaccctaatattgatgaagatcgcttgcaagaaattgcaggtgctgcagcagagaacatgttaggcagtttgctgtgcctcccaggttcagggtcagtgcttcttgacccctgcactggttctaccatatcagagacaacaagtgaagcttggagtgtagaggtattgccaagtgactcagaggccccagacctaaagcaggaggagcgtctgcaagaactggagagctgttctggactgggtagcacatctgatgatacggatgtcagggaggtcagttcccgccccagcacaccaggcctcagtgttgtgtccggcataagtgcaacctctgaggatattcccaataagattgaagacctgagatctgagtgcagctctgattttgggggtaaagattctgtcactagtccagacatggatgaaataactcacgattttctttatatacttcagccaaaacaacattttcaacacattgaagcagaagcagacatgagaatccagctgtcttctagtgcccaccagctgacctctcctccttctcagtcagagtctctgctggccatgtttgatccactgtcttcacatgaaggggcttctgctgtggtaaggccaaaggttcactatgctaggccatcgcatccaccaccagatcccccaatcctggaaggagctgtgggaggaaatgaggccaggttgccaaactttggttcccatgttttaactccagctgaaatggaggcattcaagcaaaggcattcttaccctgagagactagttcgaagcaggagctctgatatagtatcttctgtccggagacccatgagtgaccccagctggaaccggcgtccaggaaatgaagagcgagaactccctccagctgcagccattggtgctacttctttggtggctgcacctcattcatcatcttcatccccgagtaaggactcctcaagaggagagactgaagaacgcaaagatagcgatgatgagaaatcagacaggaacagaccttggtggagaaaacgttttgtttcagccatgcctaaagctcctataccatttagaaagaaagaaaaacaagaaaaagacaaagatgatctggggcctgacagattctcaacactcacagatgatcccagccctagactcagtgcacaagctcaggtggctgaggatattctggacaaatacaggaatgccattaaacggaccagccccagtgatggagcaatggcaaactatgaaagtacagaggttatgggtgatggtgaaagtgcacatgattctccccgtgacgaagcactgcagaacatctcggctgatgatctcccagactctgcaagccaagcagcccacccgcaggattcagctttctcttacagagatgcaaaaaagaaactgaggcttgctctttgctctgcggactctgttgccttcccagtgctgacccattcaacaaggaatggtttaccagaccacacagacccagaagacaatgaaattgtatgcttcttaaaagttcaaatagctgaagcaattaatttacaagataagaatctaatggctcaacttcaagaaacaatgcgctgtgtgtgccgttttgataataggacttgtaggaaactgctggcttcgattgctgaggactacagaaaaagagccccatatattgcttatctcactcgttgtcgacaaggactacagaccacacaggctcacctggaaaggctattgcaaagagttttgcgggacaaagaagtggccaatcgatactttaccactgtctgtgtgagattactgcttgagagcaaagaaaagaagatcagggaattcattcaagactttcagaaactcaccgcagctgacgataaaactgctcaggtagaagattttctgcagtttctttatggtgcaatggcccaggatgtcatatggcaaaacgcgagtgaagaacagcttcaagatgcacagctggccattgagcgaagcgtgatgaaccggattttcaagctcgccttctaccctaatcaagatggggacatacttcgcgaccaggttcttcatgaacatatccagagattgtctaaagtagtgactgcaaatcacagagctcttcagataccagaggtttatcttcgagaagcaccatggccatctgcacaatcagaaatcaggacaataagtgcttataaaaccccccgggacaaagtgcagtgcatcctgagaatgtgctctacgattatgaacctcctgagcctggccaatgaggactctgtccctggagcggatgactttgttcctgtgttggtgtttgtgttgataaaggcaaatccaccctgtttgctgtctactgtgcagtatatcagtagcttttatgctagctgtctgtctggagaggagtcctattggtggatgcagttcacagcagcagtagaattcattaaaaccatcgatgaccgaaagtgaccaagaccaaggcccaccaaggcagcagactgttaatcagacaaacagatctctgagaaggtgcatcagctgctttgaaggctgaagattgttttgtatgatactgcacagcatcaggcattttaaagcagatctttactaaacaggttaatgagctaacaagcaggttctctcgtctttgggctctttcctttctgagttgcatattctattttcttgtccccaagtagagactagtactacaaaaagggaccacatttttcaagtatttctaagtataaaaaacaaaacaaaaatctcttaggaaatgtctagacctccattcttggattccctttctttccttttattttaaaaaagaacagtacccctcttttaagatgctgtcttacattaatgagcatctaatggaaagaaggtatgagttgcactgaggattagaatagtggtgcgttagtggcattatctataaatacactcacctaaattgaaagctaagaaggaaatgtaaatataatatatatttatatttgatgtaatatggacatctgcagattctaataaacaaggactattgctgat

SEQ ID NO: 8 - DNA, 442 bp, Homo sapiens
gtactgctatatgccaggtaggacattaacccggtttgtttctaagtttccagccttatcccggcattcatctttccacagattttttgccctacttaggtttctgtgccatccacctttgagccagctttgtcattctgcttaagttgacaaactcatcaagttacagaatctttagcatatgcatactctatatgagtcaagagctgaccttttcaaaaaaaaattatactttgacagccgtatatatatatataaagcaacataagacattttaaataacaatatataaatttctatcctgttgtttttaaaactagaaacagggcaattaaataatcattcaatatatgggcaaaaggattccaccttatccttccctcctgccagtggtgcagaaagtggtcaagggagagtggtggatgaagagggatagggggag

SEQ ID NO: 9 - DNA, 964 bp, Homo sapiens
gggatctttatcattcttctaacatgttttggtttctctaatggttcattttcctttagcttgtgaaaattagggcagtttgtccagagccttactcgcaggagacaccagacccaacccatgcttagatttctgttaataaaagggagaagggtatttgaataggtagtaaaggcaggtacaagtttaagggagcagggctatcatatgtactaggtgagatttctataaatgtctgaaaagttacatgcatagtcattggctcaggtaatttctctgaatttgaacttatttgatttatttaaccaagttattataatatgcagttctctttaatcaatcttctattattcaatcatctatccatttattaattcaacaaatatttattaaagtgcctaccatgattatgtgctgtagaaaagacaaggacatttactaggggggattgtgggcccaatcggcatcataagcatgtctgaagcaaaagacaataatcacatccaacggcaccagttcagctcaactttagaattcagcagtaacagtacagatggcctaaagtacatctgtgtgtatctggtacgtgtgcacacacccatgtatatatatttatctatctgtacaaacactacatatgtatacacactatctatgtaaaatataatatatgtataatgcatataaattctaacaagtgtatttgtgttatctttaaaatagaacaattgtatcttgaagtggtaaatgcagagaattggttttattgttgatctgtggatttaatgatttctaggtgaaaaggacgtttaagtgtacaatttcttttcttaatttaatatatttatgtaaatgcatgcctgaaatttggttagattggctgtgttttgtgtcttttaacatgatcaaatgattaaactttatcttatgactcgaaaaaaaaaaaaaaaaaaaaaaaaaaaaa

SEQ ID NO: 10 - DNA, 385 bp, Homo sapiens
gtactattcacaaggcaaggcccaaaattttgttcagagcctgtaggggagaagaggccctcctcccttgaatgtgaatgaagaaggaagggagcagaatgacctgcaatcaggagggaagcagctgaaggccaaagctgaaaagtaaaaagacagtaacaagagaaagggaggaaaatagagaggaagatctgatcaaaccatgtctgaatttaaattttatctctagacttttcagttttaactgcctttgtattttaacccatctgagtaggctttgtgctatttgtaactaatgaatataggatataatcaaaatggcggtttaagaagaccaacatttaaattattcgatgttttcactaagacgaaaatgtcaaattat

SEQ ID NO: 11 - DNA, 199 bp, Homo sapiens
ctaaactattgcctcaattctaaactttgttttaggggatagctcagggggcaatgccagggattaaagaaaaacattatcttcatggttggggccctgttttctgagaaatgggtgttctcctagcttgaggagggtccagctgatcttggaatattctcatgtcaacaagaaaagactgccatagcttctgactgct

SEQ ID NO: 12 - DNA, 120 bp, Homo sapiens
gtacattttattcatatttgcattttcagaatcgcagactaggaatacctttgttacacagaactaagcacaacaaaatatttgttgctatttgctagtatcaagttttgagtggaggcc

SEQ ID NO: 13 - DNA, 3913 bp, Homo sapiens
agaggcgtactcggcggcggcggagcgggcggcagagcagggcggcggcgactcgcagggtaccaccatcttaaggacagaaaagctacaggactctaggaggccaccgtcctgatttgggaagtccaacttactttggccagacagcagctaagctggttcatcccatcagcctggattggtgaaactgaatcacaggagatatttccaggtttgctgggatgggaaacctgctcaaagtccttaccagggaaattgaaaactatccacactttttcctggattttgaaaatgctcagcctacagacggagagagagaaatctggaaccagatcagcgccgtccttcaggattctgagagcatccttgcagacctgcaggcttacaaaggcgcaggcccagagatccgagatgcaattcaaaatcccaatgacattcagcttcaagaaaaagcttggaatgcggtgtgccctcttgttgtgaggctaaagagattttacgagttttccattagactagaaaaagctcttcagagtttattggaatctctgacttgtccaccctacacaccaacccaacacctggaaagggaacaggccctggcaaaggagtttgccgaaattttacattttacccttcgattcgatgagctgaagatgaggaacccggctattcagaatgacttcagctactacagaagaacaatcagtcgcaaccgcatcaacaacatgcacctagacattgagaatgaagtcaataatgagatggccaatcgaatgtccctcttctatgcagaagccacgccaatgctgaaaacccttagcaatgccacaatgcactttgtctctgaaaacaaaactctgccaatagagaacaccacagactgcctcagcacaatgacaagtgtctgtaaagtcatgctggaaactccggagtacagaagtaggtttacgagtgaagagaccctgatgttctgcatgagggtgatggtgggagtcatcatcctctatgaccatgtccaccctgtgggagctttctgcaagacatccaagatcgatatgaaaggctgcataaaagttttgaaggagcaggccccagacagtgtggaggggctgctaaatgccctcaggttcactacaaagcacttgaacgatgaatcaacttccaaacagattcgagcaatgcttcagtagagctctgctcaaagaagaggatctatgtgctgacctcagaagatgtatatgtttacataatttaatacagattgatgttaatacttgtgtatttacataaccgtttccttcttgtcactgaaatatatggaccttaatttgtatcctgactgactcaacccagcagagcataaattgacttgagagccttacctttgatgtctgaaatgaaacccccttctccaaaggcaaaattcggagactttgatctttgctactggagtcctttaacaacatctataacgataaaaaattcctaattgtttgtggtagtattttaattctagatgtgttatctctctgggaagtatagtttatagaaacacaaaatatttgatttcctgtgtcggctcagctacaagaaacacaactgttatcttgacagaggaagagaggaatccaagaaaaatgcatgtggagaattaaacccaagtgtttcgaattcagcacaccccctctctgtcctcagactgcagtccacacgtgcaacttttctgtttgcacgtgttttattaatcagcgtactccttttctgtttggatttatatccctctaatgttctcctttaatttcacatgaaaaaaaaatctcctgtatttttttcagttagtgggagagcagcagaaatagatagatgtgctgttgccactggactgatgaaggtggctgtcttggaactgggagacaggtcctcagaggtgcactcaggcaacaggacagccatctctctgcttcagccctctgcctacagggattagggaaatggagctctggctttgaagttatttgtgagtttagcaaccttccagttacctgcagagttctgggtgcacagccacccctcataagagccctgttctctgaagaccattcatatgagaacaaaggtctaggatactgcattagttaccagaaaactaggggaatttagagggaaaaaaaatccatgttttctatttcccaggtttttaaaaagtagctcttccccaaccccgttgctagcttgttgcaatataaaagccctggtgcacctgaatttactcctggccttactaatgattcttaatgtgatcttgagaaatgtgtttaagctttctgagtcttaacctccttgtctctaaaatgggcaattaaaacaatcttcaagagccctgtaaggttaatgccgataaaatgactgactccgcccttcttccttagtacgtagtatccagcaagcatttgccccaccttgtcttgttgatgaacaatattatgaagcctgcagtcattctctctgtacatcagagcttagttcgaatggaatcatgaaaatctctgattctgacctcctaaggaaaaatgaaacccagaggatgtggtcatacaggatggctcccatgtgggcctagaacccaggatgcttcactcttgactccatgctcttccttttataccatgtggctgtgaatacatactatgggatgggattcaacccttctaagtaaatcctcagtctggtctatgttgttacttgcctgtttccactagaaggagtcacccaggcatttagtgaatgataatcctagaagttgagtctgagtacatcagagtttggcattatttgcaacatcccaggaatgagctataagactccattgctttctggactttagtgaccagctgatcttcccttggatcctccaataaaggggaaaaaatacttgtcttatgttgttttagcaagggagttcagccaagtgacaggaaagattccctggtctgcatctaaacattagtcaacagaaggaaaaggctcttttccttggagattttcaagttgaaaaagtacagctgcttggatggagtttctctcatcagaatagaaatatgctaggtggtcttcaagacctttttgaacctacagattctaaaccttagaggaagccagaatatgtgatcataccaggtgaggaaagttaggagatattcatcttaagagatatcctatttggcagtcacatgttacacttgagcaacaattgtctaggctagaaatatagaaccacacaatatttatcatcattgggtcaatttctccccctctatcaagtgaggagattaaggcttaaagaaaggaaaggacttgccagccaccacagggctcatgaggggcttgaacccatgtcgtgtgtctctaccacagctgactctcagctggctaatggagaaaatgtgaggaattacctgtcaaattagattgagctcagagtaaatagatgagcacatttataactctaaattagactttctatcaaatgggaccaaacatatggaaggggctgctgtcctgcctcaatttagccaagacttgtcttgtctcgaagccaagactcagcagtacatggattctgagaagtccagggtctgaattgttgtctctgattactggaaggacaggttaactgaatgtctgtgatcactaacaggtgatgggctttgtgcccactccagagatattgtgggagacaaattcttttaacagcctgtcctcccggcatcaggagtcattgaacaatcatggattgttgtgtttgggatttttttttttttggctttgtttttggtttttgtgtgtgtgtgtgtgtgctgcatgcacatgcgtccaagacttacgggtggtttaggggaaagtgctagca

SEQ ID NO: 14 - DNA, 623 bp, Homo sapiens
gtaccttctttaattttatattttgatcaccaattaaagaaattaccttcgtgaacagatgcattttataaagctgagatttttataattctagaggcaaccttcctcatcaagtgtccaacctaggtcaaatatcaagggcttaaagcaaagatctgttggaaattttataattaaaaataaatgaccaatgaagagaggcagccttctaaaaaataaatatttcattttgttgttaaactgatatttaattctaatttaattacagatttattagtttgaggccaattttaatagttaaaaattatttatcattttgaagtcttaaaaatatcattttgtcaattttaaattaccatttttctggttaaggctacttcagatataaaaggtatcaaactgcccaaaaatactttggagctgttgctgcatacacagacaatgcatccttttaaaggatcgtctgcattttgacttacattatctgatcaaatattagttttaaaaaattatcaaaagttaggtattgcattaagaaaagaatccatctcaaaatgtgaatcatgaaccttggcagacagtgattcaaagtaatcatttcactttaatatccaggtttgaat

SEQ ID NO: 15 - DNA, 1713 bp, Homo sapiens
ctcgaacttctgacctcaagtggtccacctgccttggcctcccaaagtgctgggattacaggtgtaagccaccgcacctggccagtttctatcataaattttaaatgtaagattggaagatacagagagctgtataaaatcataccagtagggtataattagcccaggtagtttaggaataaaattgggttgtatccgagtgccctaacttgacattttgattctccagcctgggcaacggagtgagactccatctcacaaaaaagagaaaagaaaagaaaactttgcttcactaagtttctcttgccattatctcattaattcagatctgtacctcattgctgctcacacatatatgtttcttaccttagcctgaaccttctcaggccttgaagtcattattctactctttttttttcttttccttttttatggcactagagaatgaaaacctaaggtcttagaaaatcttaacttgaaaaagtctctaactggcatgatttgattacttttttcccctgtggacaaataattttctttcctatataatagatttttagtaagtgaaacctttgctgctgctttcctgggtttacattagttttttcctgcccttaagaataatttatctgtgcttctctgatgactgttaatttctaatagtgcaggaagggatgagcttttgatttcttctcactcccctcctcaccctacttccaaattacacactaacttctaacccttacagcctgttggcacatacacaagatccacgagaccatgctcctcagaagctacccatgtcctttctcaccatggtgtggctcttggagccctgagtatctgtgactacccactccaaaggttgactgtaagaggagagcggccttcttaattttgcatttcttaattttgtttttctccattcctgttttatgacttggccttcagatgcttcctactctggcctcctccttttttctcctaggaattgtttccaggtaacctaccatgtgcacttctcagctgctctgctcacctttgcccaccttcccgtgaccctgagagtacagatccgaataatgtggcctgtgcagagctcagagaactgtgaggactacccatgcctgtcagactctgctcagggacagagatggatgggtaaatggtgctgttggagacatttttatcttcataccaggctctgtttcatccctgcaccccgcacccccactcactcccctgagggggtaaaatgcagaggtggttgacctgaagggtctgattccctccttcccaagccttagggcctaccctggagtgctgcagtgtgtgagagctgctgcttgcttgtttctccactaggcctgctccaaatgcttagccaatctctggagccgacacagttgcctacggggtgacttagcaccaggttccattagctctccaagtgactgtttccacccagtacttttggcgcttgaggatggggggagggggattatttaaaataaataaaatccgaggtggcagtagaggattccttttgctttaaaaatctttggactaaaaaaaaaaaaaaaaagttttttatatataaatatataaagtaaattgttatgtaactattattgtttcttgtatgttctaattttgttttatgatgtaattaaagaaagtaagctgtgaagacttttcattttcctgtggaaa

SEQ ID NO: 16 - DNA, 1503 bp, Homo sapiens
gcttggtgcgtgcgcggcgactgcgacgggcagtggcagtcatggcggctcagtgcgtgaggttggcgcggcgcagtcttcctgctttggcgttgtctctcaggccatctccccggttgttgtgcacagccacgaaacaaaagaacagtggccagaacctggaagaggacatgggtcagagtgaacagaaggcagatcctcctgctacagagaagaccctcctggaagagaaggtcaagttggaggaacagctgaaggagactgtggaaaaatataaacgagctttggcagacactgagaacttacggcagaggagccagaaattggtggaggaggcaaaattatacggcattcaagccttctgcaaggacttgttggaggtggcagacgttctggagaaggcaacacagtgtgttccaaaagaagaaattaaagacgataaccctcacctgaagaacctctatgaggggctggtcatgactgaagtccagatccagaaggtgttcacaaagcatggcttgctcaagttgaaccctgtcggagccaagttcgacccttatgaacatgaggccttgttccacacaccggttgaggggaaggagccaggcacagtggccctagttagcaaagtggggtacaagctgcatgggcgcactctgagacccgccctggtgggggtggtgaaggaagcttagctgctgttgatggggtgggtgtttttaaactcacttgatgtaactctcaaggctggttcattgtttctcatctatgagtacgtgtgaccttttcccaaaccttattggaaaccttaagtaaccagtggctaaacagaaaagccggttgcccaactgcattaatgaactctaattcgggagtctgttcccttttagtgccacgcgttgaatagttccacatactttcagaagagctcagcagggccctgcctggtctcccgagcatcatgagtaacgtgtctgctcagactctgctgacaccaaagtattttaaacaaataaaaggtcttggggaattctgtttggctacctgggcacgccagtctgcaccatgtgtccctgcggcgcatgagtgactggcgtatttagcccgtcacatttcattcgctgaaggaaaggcaagagagttgaaacatttttcttacttaaaaaaaatgatctttgtgaagaacatagtgagttcgtttgtcttcagtcaacagcggctgaaactgaccactgagaaatgggtgtgggcactgacagttctcccccattatttggccaggaattgagcttggcttggcaaagttccttttaccctgttctgttcatctaaatgcagacatatttaaatcatattcaactagttactaatgacctcaagttgtattccctggcaaaatggactttctcaaaataggactgcacgcttggtgtactttaaatgttaatgtttaatttaaaatttttatttaagaggattaaagccctaatgtttattttccta

SEQ ID NO: 17 - DNA, 1680 bp, Homo sapiens
gggctgcggtacggcgtgttggtcccagcggttcagctgaggtagggacgtgctgtaggccggaatgttaccggctgttggatctgcggatgaggaggaggatcctgcggaggaggattgtcctgaattggttcccatggagacgacgcaaagcgaggaggaggaaaagtctggcctcggcgccaagatcccagtcacaattatcaccgggtatttaggtgctgggaagacaacacttctgaactatattttgacagagcaacatagtaaaagagtagcggtcattttaaatgaatttggggaaggaagtgcgctggagaaatccttagctgtcagccaaggtggagagctctatgaagagtggctggaacttagaaacggttgcctctgctgttcagtgaaggacaatggccttagagctattgagaatttgatgcaaaagaaggggaaatttgattacatactgttagagaccactggattggcagacccaggtgcagtggcttctatgttttgggttgatgctgaattagggagtgatatttaccttgatggtatcataactattgtggattcaaaatatggattaaaacatttaacagaagagaaacctgatggccttatcaatgaagctactaggcaagttgctttggcagatgccattctcattaataaaacagacctggttccagaagaagatgtaaagaaattaagaacgacaattagatccataaatggactaggacaaatcttagaaacacaaagatcaagagttgatctctctaatgtattagatcttcatgcctttgatagtctctctggaataagtttgcagaaaaaacttcagcatgtgccaggaacacaacctcaccttgatcagagtattgttacaatcacatttgaagtaccaggaaatgcaaaggaagaacatcttaatatgtttattcagaatctcctgtgggaaaagaatgtgagaaacaaggacaatcactgcatggaggtcataaggctgaagggattggtgtcaatcaaagacaaatcacaacaagtgattgtccagggtgtccatgagctctatgatctggaggagactccagtgagctggaaggatgacactgagagaacaaatcgattggtcctccttggcagaaatttagataaggatatccttaaacagctgtttatagctactgtgacagaaacagaaaagcagtggacaacacgtttccaagaagatcaagtttgtacataacactagaggcatttcttatcaaaaggattggataataaaaataagtttctactgggtatatttcaagcatttatttattactttagttacgaattccaatatactttaaaatggtatttgttttacagcatacataaaatgtagcaaatcagtactgtaaaacatttaacattcatacagttatatataatatccttttttttaaagaatggtatttcacaaaaatatcttttgaaattggctttggagtttacatatactgaacatgaaagtttataataatgatgatacaactttcaacattgtcattttttcttagaacttcagctgattgcagagatataatgattacattgttattaaatttttttaacacaagtaagtgtcaccattttatgacatgaaataaaaggttatgactgttatcg

SEQ ID NO: 18 - DNA, 3533 bp, Homo sapiens
ggcacgagggggatgccgggggggcaagatggcggcggcagtaggggttcgtggccggtacgagctgccgccttgctccggcccaggctggctcctcagcctttccgccttgctgagtgtggcggcacgaggggccttcgccaccacgcactgggtcgtcacggaggacgggaaaatccagcagcaggtggattcaccaatgaacttgaagcatcctcatgacctagtcatattaatgagacaagaagcaacagttaactacctcaaagaattagagaaacaattagttgctcaaaaaattcacatagaagagaatgaggacagagacacaggactggaacagagacataataaagaagacccagactgcatcaaagccaaggtgcccttaggggacctggatctatatgatggcacatacataactttggagagcaaagacatcagtcctgaagattatatagacacagaatctcctgtccctccagacccagagcaacctgattgtactaaaattctagaacttccatatagtatacatgcttttcagcacttgagaggtgtacaggagagagttaatctttctgcacctctgctacctaaagaagacccaatcttcacatatttatctaaacggttaggaaggagtatagatgacataggtcacctcattcatgaaggcctacagaagaacacttcctcgtgggtactgtataacatggcttcattttactggagaattaagaatgagccatatcaggtagtagaatgtgccatgcgagcacttcacttctcttccaggcacaataaagacattgccctggtcaacctggcaaacgttctacacagagcacacttctctgctgatgctgctgtcgtggtccatgcagctctggatgacagtgacttcttcaccagctattacactttggggaatatatatgcaatgcttggggaatataaccactcagtgctctgttatgaccacgctttgcaggccagacctgggtttgagcaagctataaagaggaagcatgctgtcctatgtcagcaaaaactggagcagaaattggaggctcagcatagatctctccagcgaacactgaatgagttaaaagagtatcaaaagcagcatgaccactacctgagacagcaggaaatcctagaaaaacataaactgattcaggaggagcaaatcttaagaaatatcattcatgagactcagatggcaaaagaggcacaattaggaaatcatcagatatgccgactggtcaaccagcagcatagtttacattgccagtgggaccagcctgtacgctatcatcgtggagatatctttgaaaatgtggactatgttcagtttggtgaggattcatcaacctccagtatgatgtctgtgaactttgatgttcaatcaaatcagagtgatatcaatgattcggtcaagtcttctcccgtagcccattctattctctggatttggggcagggactctgatgcatatagggacaaacagcatattctatggcctaaaagagcagattgtacagaaagctaccctagagtccctgttggtggggaattgccaacgtattttctgcctccggaaaacaaaggactcaggatccacgaactcagcagtgatgattattctacagaagaagaggcccaaacccctgactgttccataactgacttcagaaaaagccacactctgtcctacttagtcaaagaattagaggttcgcatggatctgaaagccaaaatgccagatgaccatgcacgaaaaattttgctttcccgtattaataactatactatcccagaagaagaaattgggtctttcttatttcatgctattaataagccaaatgctcctatctggctcatactcaatgaagctggactatactggagagcagtaggaaatagcacttttgctattgcctgtcttcagagggctttgaatttagctccacttcaataccaagatgttcctcttgtcaacttggccaaccttttgattcattacggccttcatcttgatgccactaagctgctacttcaagctttggccatcaatagctctgagcctctgacctttttgagcctgggaaatgcttaccttgctctgaagaatatcagtggggcacttgaggcctttagacaggccttgaaattaaccaccaaatgtccagagtgtgaaaacagcctgaagttgatccgctgtatgcagttttatccttttctgtacaacatcacttcttctgtttgcagtggtacggtggttgaggagagcaatggttctgatgagatggagaattcagatgaaaccaaaatgtcagaagaaatactggctttggtggatgaatttcaacaggcatggcctttggaaggctttgggggtgcactagagatgaaagggcggcgtctagacttacaaggaatacgggtgctgaagaaaggtccccaggatggagtggccagaagctcttgctatggagactgcagaagtgaagatgatgaagcaacagaatggattacattccaggtcaaacgtgtaaagaaacccaaaggagatcataagaaaactcctgggaaaaaagtagaaacaggtcagatagaaaatggacatcgttaccaagcaaacctagagatcactggccccaaggtggcatctcctgggccacaaggaaaaaaacgtgactaccagcgtctgggatggcccagcccggacgaatgcctcaaactccgctgggtagagctgactgccatcgtgagtacctggcttgcagtttcttcaaaaaacattgacatcacagaacacatagattttgccacccctatacagcagccagcaatggagcctctttgcaatggcaatctccccacgagtatgcataccctggaccacttgcatggggtttccaaccgagccagcctgcactacacaggggagagtcagttaacagaggtattacaaaatctcggcaaagaccaatatccacaacagtcgcttgaacagattggcacccgaattgccaaagttttggaaaagaaccagacgtcctgggtcctctccagcatggcagccctctactggagggtgaaaggccaaggaaagaaggcaatcgactgcctccgccaggctctgcactatgcgccacaccagatgaaggatgtgcccctgattagcctggccaacatcttgcacaatgccaagctctggaatgacgccgtcatagtagccaccatggcagtagagatcgcaccacactttgctgtgaaccacttcactctgggcaatgtctacgtggcaatggaagaatttgaaaaagcactggtgtggtatgaatccacattgaagcttcagcccgagtttgtcccagccaagaaccgaatccagaccatccagtgtcacttaatgctgaagaagggacggcgctctccttagtgcacttcttccttctctctttctctttactcatgctctaaaaaaaaaaaaaaaaaaaaaaaaaaaaaaaaaaaaaaaa

SEQ ID NO: 19 - DNA, 511 bp, Homo sapiens
gtcacacgcacatcccaaagccctcgctctccagattccagtcagagttctatggcccaggaggaagaggaggaagagcaaggaagaactaggaaacggaaacagagtggtcagtgcccagcccggcctgggaagcaacgcatgaaggagaaggagcaggagaacgagcggaaagtggcacagctagctgaagagaacgagcggctcaagcaggaaatcgagcgcctgaccagggaggtggagaccacacggcgggctctgatcgaccgcatggtcagcctgcaccaagcatgaacagtgggcatcacctcctgtctgtctctccggaagtgtacccagcaccatcgcgccagcgccaagcatgtgaccctgcactgcactgcacatgctgaggaggggactgagggtagaccaggagagggctcggcttgcacatagacggtacattgtttattactgtccatgtccagtaaagtgactttgtgtcaacagccaaaaaaaaaaaaaaaaa

SEQ ID NO: 20 - DNA, 3254 bp, Homo sapiens
ggcacgaggagctcggcttgcccttcccctgcttgtgccgtgtaccctgtaacactgtgtttggatcccagcatcagatggatgttgccttcctggagaaactgattaaagatgatatagagcgaggaagactgcccctgttgcttgtcgcaaatgcaggaacggcagcagtaggacacacagacaagattgggagattgaaagaactctgtgagcagtatggcatatggcttcatgtggagggtgtgaatctggcaacattggctctgggttatgtctcctcatcagtgctggctgcagccaaatgtgatagcatgacgatgactcctggcccgtggctgggtttgccagctgttcctgcggtgacactgtataaacacgatgaccctgccttgactttagttgctggtcttacatcaaataagcccacagacaaactccgtgccctgcctctgtggttatctttacaatacttgggacttgatgggtttgtggagaggatcaagcatgcctgtcaactgagtcaacggttgcaggaaagtttgaagaaagtgaattacatcaaaatcttggtggaagatgagctcagctccccagtggtggtgttcagatttttccaggaattaccaggctcagatccggtgtttaaagccgtcccagtgcccaacatgacaccttcaggagtcggccgggagaggcactcgtgtgacgcgctgaatcgctggctgggagaacagctgaagcagctggtgcctgcaagcggcctcacagtcatggatctggaagctgagggcacgtgtttgcggttcagccctttgatgaccgcagcagttttaggaactcggggagaggatgtggatcagctcgtagcctgcatagaaagcaaactgccagtgctgtgctgtacgctccagttgcgtgaagagttcaagcaggaagtggaagcaacagcaggtctcctatatgttgatgaccctaactggtctggaataggggttgtcaggtatgaacatgctaatgatgataagagcagtttgaaatcagatcccgaaggggaaaacatccatgctggactcctgaagaagttaaatgaactggaatctgacctaacctttaaaataggccctgagtataagagcatgaagagctgcctttatgtcggcatggcgagcgacaacgtcgatgctgctgagctcgtggagaccattgcggccacagcccgggagatagaggagaactcgaggcttctggaaaacatgacagaagtggttcggaaaggcattcaggaagctcaagtggagctgcagaaggcaagtgaagaacggcttctggaagagggggtgttgcggcagatccctgtagtgggctccgtgctgaattggttttctccggtccaggctttacagaagggaagaacttttaacttgacagcaggctctctggagtccacagaacccatatatgtctacaaagcacaaggtgcaggagtcacgctgcctccaacgccctcgggcagtcgcaccaagcagaggcttccaggccagaagccttttaaaaggtccctgcgaggttcagatgctttgagtgagaccagctcagtcagtcacattgaagacttagaaaaggtggagcgcctatccagtgggccggagcagatcaccctcgaggccagcagcactgagggacacccaggggctcccagccctcagcacaccgaccagaccgaggccttccagaaaggggtcccacacccagaagatgaccactcacaggtagaaggaccggagagcttaagatgagactcattgtgtggtttgagactgtactgagtattgtttcagggaagatgaagttctattggaaatgtgaactgtgccacatactaatataaattactgttgtttgtgcttcactgggattttggcacaaatatgtgcctgaaaggtaggctttctaggaggggagtcagcttgtctaacttcatgtacatgtagaaccacatgtttgctgtcctactacgacttttccctaagttaccataaacacattttattcacaaaaaacacttcgaatttcaagtgtctaccagtagcacccttgctctttctaaacataagcctaagtatatgaggttgcccgtggcaactttttggtaaaacagcttttcattagcactctccaggttctctgcaacacttcacagaggcgagactggctgtatcctttgctgtcggtctttagtacgatcaagttgcaatatacagtgggactgctagacttgaaggagagcagtgattgtgggattgtaaataagagcatcagaagccctccccagctactgctcttcgtggagacttagtaaggactgtgtctacttgagctgtggcaaggctgctgtctgggactgtcctctgccacaaggccatttctcccattatataccgtttgtaaagagaaactgtaaagtctcctcctgaccatatatttttaaatactggcaaagcttttaaaattggcacacaagtacagactgtgctcatttctgtttagtatctgaaaacctgatagatgctacccttaagagcttgctcttccgtgtgctacgtagcacccacctggttaaaatctgaaaacaagtacccctttgacctgtctcccactgaagcttctactgccctggcagctcgcctgggcccaactcagaaacaggagccagcagagcactctctcacgctgatccagccgggcaccctgcttaagtcagtagaagctcgctggcactgcccgttcctacttttccgaagtactgcgtcactttgtcgtaagtaatggcccctgtgccttcttaatccagcagtcaagcttttgggagacctgaaaatgggaaaattcacactgggtttctggactgtagtattggaagccttagttatagtatattaagcctataattatactctgatttgatgggatttttgacatttacacttgtcaaaatgcagggggttttttttggtgcagatgattaaacagtcttccctatttggtgcaatgaagtatagcagataaaatgggggaggggtaaattatcaccttcaagaaaattacatgtttttatatatatttggaattgttaaattggttttgctgaaacatttcacccttgagatattatttgaatgttggtttcaataaaggttcttgaaattgttaccagtgaaaaaaaaaaaaaaaaaaaaaaaaaaaaaaaaaaa

SEQ ID NO: 21 - DNA, 1075 bp, Homo sapiens
gttttcttcgaagatttggggctccgcgatacagttaggatggctgtagtacctctgctgttgttggggggtttgtggagcgctgtgggagcgtccagcctgggtgtcgttacttgcggctccgtggtgaagctactcaatacgcgccacaacgtccgactgcactcacacgacgtgcgctatgggtcaggtagtgggcagcagtcagtgacaggtgtaacctctgtggatgacagcaacagttactggaggatacgggggaagagtgccacagtgtgtgagaggggaacccccatcaagtgtggccagcccatccggctgacacatgtcaacactggccgaaacctccatagtcaccacttcacttcacctctttctggaaaccaggaagtgagtgcttttggtgaggaaggtgaaggtgattatctggatgactggacagtgctctgtaatggaccctactgggtgagagatggtgaggtgcggttcaaacactcttccactgaggtactgctgtctgtcacaggagaacaatatggtcgacctatcagtgggcaaaaagaggtgcatggcatggcccagccaagtcagaacaactactggaaagccatggaaggcatcttcatgaagcccagtgagttgttgaaggcagaagcccaccatgcagagctgtgaatctagaggctctgagccactgttaacgcacaatgttcacagacatctgttgctgcctcaccttgggatccctgccacaagttccttgggcagtggccatgtcaccattgagatgaagatatacaacagaaaatagtggctgtgtttggaagcttcagccctgcacatttgaactagtcactctcccagacttgcgtgggtcagttctttctgagtagaggacttgctggtaaaggggcagatgctttttattagtactgataaaacaaactgagggaaacatccctcttagctgggaaacttttactcttcaggagcttggcatcatggactgttaatgtatgtgattttccccctattttctctctccaaaatgataaaaacaataattttattatga

SEQ ID NO: 22 - DNA, 1737 bp, Homo sapiens
atggcgtgcggctttcgccgcgctattgcttgccagctttccagagtgttgaatcttccaccagaaaacttgatcacatcaatatctgcagttccaatttcccaaaaagaagaagtagctgattttcagctttctgtggattctttattggaaaaagacaatgaccattcaagaccagatattcaagttcaagccaagagactagcagagaagctaagatgtgatacagtggtgagtgaaatcagtactggtcaaaggactgtaaatttcaaaataaacagagagctcttaacaaagacagtgctacaacaagtaattgaagatggctcaaaatatggattaaaaagtgaacttttctctggacttccccagaagaagattgtggttgaattcagttcacctaatgttgccaaaaaatttcatgttggacatttgcgttctaccatcataggaaattttatagcaaatctcaaagaagctttaggacatcaagtaataagaataaattaccttggcgattggggcatgcagtttggtcttctgggaactggcttccagctgtttggctatgaggaaaaactgcagtccaatcctctacagcatctctttgaagtttatgtacaagttaataaagaagcagcagatgataaaagtgtagcaaaagcagcacaggagttcttccaacgattggaactgggcgatgtgcaagcactttcactgtggcaaaaatttcgggacttgagcattgaagagtacattcgggtttacaagcgtctgggagtatattttgatgaatattcaggagaatcattttatcgtgaaaaatctcaagaggtcttaaagttgctggagagtaaaggactcctactgagaacaataaaaggaacggctgtagtagatctctctgggaatggcgacccctcctcaatttgtactgtaatgcgaagtgatgggacttctctctatgcaaccagagatcttgcagctgctatagatcgaatggacaagtataattttgatacaatgatatatgtgacagataaaggacaaaaaaagcattttcagcaagtattccaaatgctgaagatcatgggatatgactgggcagaaaggtgccagcacgtgccctttggagtagtacagggaatgaagactcgaagaggagatgtcactttcctggaagatgttttaaatgagattcaattaaggatgctacagaacatggcttcaattaagacaactaaagaactcaagaacccacaagagactgcagagagggtcgggctcgcagcactcattattcaggacttcaaaggtttactcttatctgactacaagttcagctgggatcgtgttttccagagtcgcggggacacaggagtcttcctacagtacacacacgcccgcctccacagtttggaagagacttttggatgtgggtacctgaatgacttcaacactgcttgtttacaagagccacagtctgtttcaattcttcagcatcttctcaggttcgacgaggtgctttataaatcatctcaggactttcaacccaggcatatcgtcagttaccttctaactttaagtcatcttgcagctgtggcacacaaaacactacaaataaaagatagtcctcctgaagtggctggggccagacttcatcttttcaaagctgtccgttctgtcctagccaatggaatgaaacttcttggaataacacctgtatgtaggatgtaa

SEQ ID NO: 23 - DNA, 2712 bp, Homo sapiens
gtcatgttcttcgcgccctggtgtggacactgccagcggctgcagccgacttggaatgacctgggagacaaatacaacagcatggaagatgccaaagtctatgtggctaaagtggactgcacggcccactccgacgtgtgctccgcccagggggtgcgaggataccccaccttaaagcttttcaagccaggccaagaagctgtgaagtaccagggtcctcgggacttccagacactggaaaactggatgctgcagacactgaacgaggagccagtgacaccagagccggaagtggaaccgcccagtgcccccgagctcaagcaagggctgtatgagctctcagcaagcaactttgagctgcacgttgcacaaggcgaccactttatcaagttcttcgctccgtggtgtggtcactgcaaagccctggctccaacctgggagcagctggctctgggccttgaacattccgaaactgtcaagattggcaaggttgattgtacacagcactatgaactctgctccggaaaccaggttcgtggctatcccactcttctctggttccgagatgggaaaaaggtggatcagtacaagggaaagcgggatttggagtcactgagggagtacgtggagtcgcagctgcagcgcacagagactggagcgacggagaccgtcacgccctcagaggccccggtgctggcagctgagcccgaggctgacaagggcactgtgttggcactcactgaaaataacttcgatgacaccattgcagaaggaataaccttcatcaagttttatgctccatggtgtggtcattgtaagactctggctcctacttgggaggaactctctaaaaaggaattccctggtctggcgggggtcaagatcgccgaagtagactgcactgctgaacggaatatctgcagcaagtattcggtacgaggctaccccacgttattgcttttccgaggagggaagaaagtcagtgagcacagtggaggcagagaccttgactcgttacaccgctttgtcctgagccaagcgaaagacgaactttaggaacacagttggaggtcacctctcctgcccagctcccgcaccctgcgtttaggagttcagtcccacagaggccactgggttcccagtggtggctgttcagaaagcagaacatactaagcgtgaggtatcttctttgtgtgtgtgttttccaagccaacacactctacagattctttattaaatgtgtaactcatggtcactgtgtaaacattttcagtggcgatatatcccctttgaccttctcttgatgaaatttacatggtttcctttgagactaaaatagcgttgagggaaatgaaattgctggactatttgtggctcctgagttgagtgattttggtgaaagaaagcacatccaaagcatagtttacctgcccacgagttctggaaaggtggccttgtggcagtattgacgttcctctgatcttaaggtcacagttgactcaatactgtgttggtccgtagcatggagcagattgaaatgcaaaaacccacacctctggaagataccttcacggccgctgctggagcttctgttgctgtgaatacttctctcagtgtgagaggttagccgtgatgaaagcagcgttacttctgaccgtgcctgagtaagagaatgctgatgccataactttatgtgtcgatacttgtcaaatcagttactgttcaggggatccttctgtttctcacggggtgaaacatgtctttagttcctcatgttaacacgaagccagagcccacatgaactgttggatgtcttccttagaaagggtaggcatggaaaattccacgaggctcattctcagtatctcattaactcattgaaagattccagttgtatttgtcacctggggtgacaagaccagacaggctttcccaggcctgggtatccagggaggctctgcagccctgctgaagggccctaactagagttctagagtttctgattctgtttctcagtagtccttttagaggcttgctatacttggtctgcttcaaggaggtcgaccttctaatgtatgaagaatgggatgcatttgatctcaagaccaaagacagatgtcagtgggctgctctggccctggtgtgcacggctgtggcagctgttgatgccagtgtcctctaactcatgctgtccttgtgattaaacacctctatctcccttgggaataagcacatacaggcttaagctctaagatagataggtgtttgtccttttaccatcgagctacttcccataataaccactttgcatccaacactcttcacccacctcccatacgcaaggggatgtggatacttggcccaaagtaactggtggtaggaatcttagaaacaagaccacttatactgtctgtctgaggcagaagataacagcagcatctcgaccagcctctgccttaaaggaaatctttattaatcacgtatggttcacagataattctttttttaaaaaaacccaacctcctagagaagcacaactgtcaagagtcttgtacacacaacttcagctttgcatcacgagtcttgtattccaagaaaatcaaagtggtacaatttgtttgtttacactatgatactttctaaataaactctttttttttaaaaaaaaaaaaaaaaaaaaaaaaaaaaaaaaaaaaaaaaaaaaaaaaaaac

SEQ ID NO: 24 - DNA, 5834 bp, Homo sapiens
ccttctcctgggggccagatgcatgctggaatcagtagctttcagcagagtaactcaagtgggacttacggtccacagatgagccagtatggaccacaaggtaactactccagacccccagcgtatagtggggtgcccagtgcaagctacagcggcccagggcccggtatgggtatcagtgccaacaaccagatgcatggacaagggccaagccagccatgtggtgctgtgcccctgggacgaatgccatcagctgggatgcagaacagaccatttcctggaaatatgagcagcatgacccccagttctcctggcatgtctcagcagggagggccaggaatggggccgccaatgccaactgtgaaccgtaaggcacaggaggcagccgcagcagtgatgcaggctgctgcgaactcagcacaaagcaggcaaggcagtttccccggcatgaaccagagtggacttatggcttccagctctccctacagccagcccatgaacaacagctctagcctgatgaacacgcaggcgccgccctacagcatggcgcccgccatggtgaacagctcggcagcatctgtgggtcttgcagatatgatgtctcctggtgaatccaaactgcccctgcctctcaaagcagacggcaaagaagaaggcactccacagcccgagagcaagtcaaaggatagctacagctctcagggtatttctcagcccccaaccccaggcaacctgccagtcccttccccaatgtcccccagctctgctagcatctcctcatttcatggagatgaaagtgatagcattagcagcccaggctggccaaagactccatcaagccctaagtccagctcctccaccactactggggagaagatcacgaaggtgtacgagctggggaatgagccagagagaaagctctgggtcgaccgatacctcaccttcatggaagagagaggctctcctgtctcaagtctgcctgccgtgggcaagaagcccctggacctgttccgactctacgtctgcgtcaaagagatcgggggtttggcccaggttaataaaaacaagaagtggcgtgagctggcaaccaacctaaacgttggcacctcaagcagtgcagcgagctccctgaaaaagcagtatattcagtacctgtttgcctttgagtgcaagatcgaacgtggggaggagcccccgccggaagtcttcagcaccggggacaccaaaaagcagcccaagctccagccgccatctcctgctaactcgggatccttgcaaggcccacagaccccccagtcaactggcagcaattccatggcagaggttccaggtgacctgaagccacctaccccagcctccacccctcacggccagatgactccaatgcaaggtggaagaagcagtacaatcagtgtgcacgacccattctcagatgtgagtgattcatccttcccgaaacggaactccatgactccaaacgccccctaccagcagggcatgagcatgcccgatgtgatgggcaggatgccctatgagcccaacaaggacccctttgggggaatgagaaaagtgcctggaagcagcgagccctttatgacgcaaggacagatgcccaacagcagcatgcaggacatgtacaaccaaagtccctccggagcaatgtctaacctgggcatggggcagcgccagcagtttccctatggagccagttacgaccgaaggcatgaaccttatgggcagcagtatccaggccaaggccctccctcgggacagccgccgtatggagggcaccagcccggcctgtacccacagcagccgaattacaaacgccatatggacggcatgtacgggcccccagccaagcgccacgagggcgacatgtacaacatgcagtacagcagccagcagcaggagatgtacaaccagtatggaggctcctactcgggcccggaccgcaggcccatccagggccagtacccgtatccctacagcagggagaggatgcagggcccggggcagatccagacacacggaatcccgcttcagatgatgggcggcccgctgcagtcgtcctccagtgaggggcctcagcagaatatgtgggcagcacgcaatgatatgccttatccctaccagaacaggcagggccctggcggccctacacaggcgcccccttacccaggcatgaaccgcacagacgatatgatggtacccgatcagaggataaatcatgagagccagtggccttctcacgtcagccagcgtcagccttatatgtcgtcctcagcctccatgcagcccatcacacgcccaccacagccgtcctaccagacgccaccgtcactgccaaatcacatctccagggcgcccagcccagcgtccttccagcgctccctggagaaccgcatgtctccaagcaagtctccttttctgccgtctatgaagatgcagaaggtcatgcccacggtccccacatcccaggtcaccgggccaccaccccaaccacccccaatcagaagggagatcacctttcctcctggctcagtagaagcatcacaaccagtcttgaaacaaaggcgaaagattacctccaaagatatcgttactcctgaggcgtggcgtgtgatgatgtcccttaaatcaggtcttttggctgagagtacgtgggctttggacactattaatattcttctgtatgatgacagcactgttgctactttcaatctctcccagttgtctggatttctcgaacttttagtcgagtactttagaaaatgcctgattgacatttttggaattcttatggaatatgaagtgggagaccccagccaaaaagcacttgatcacaacgcagcaaggaaggatgacagccagtccttggcagacgattctgggaaagaggaggaagatgctgaatgtattgatgacgacgaggaagacgaggaggatgaggaggaagacagcgagaagacagaaagcgatgaaaagagcagcatcgctctgactgccccggacgccgctgcagacccaaaggagaagcccaagcaagccagtaagttcgacaagctgccaataaagatagtcaaaaagaacaacctgtttgttgttgaccgatctgacaagttggggcgtgtgcaggagttcaatagtggccttctgcactggcagctcggcgggggtgacaccaccgagcacattcagactcactttgagagcaagatggaaattcctcctcgcaggcgcccacctccccccttaagctccgcaggtagaaagaaagagcaagaaggcaaaggcgactctgaagagcagcaagagaaaagcatcatagcaaccatcgatgacgtcctctctgctcggccaggggcattgcctgaagacgcaaaccctgggccccagaccgaaagcagtaagtttccctttggtatccagcaagccaaaagtcaccggaacatcaagctgctggaggacgagcccaggagccgagacgagactcctctgtgtaccatcgcgcactggcaggactcgctggctaagcgatgcatctgtgtgtccaatattgtccgtagcttgtcattcgtgcctggcaatgatgccgaaatgtccaaacatccaggcctggtgctgatcctggggaagctgattcttcttcaccacgagcatccagagagaaagcgagcaccgcagacctatgagaaagaggaggatgaggacaagggggtggcctgcagcaaagatgagtggtggtgggactgcctcgaggtcttgagggataacacgttggtcacgttggccaacatttccgggcagctagacttgtctgcttacacggaaagcatctgcttgccaattttggatggcttgctgcactggatggtgtgcccgtctgcagaggcacaagatccctttccaactgtgggacccaactcggtcctgtcgcctcagagacttgtgctggagaccctctgtaaactcagtatccaggacaataatgtggacctgatcttggccactcctccatttagtcgtcaggagaaattctatgctacattagttaggtacgttggggatcgcaaaaacccagtctgtcgagaaatgtccatggcgcttttatcgaaccttgcccaaggggacgcactagcagcaagggccatagctgtgcagaaaggaagcattggaaacttgataagcttcctagaggatggggtcacgatggcccagtaccagcagagccagcacaacctcatgcacatgcagcccccgcccctggaaccacctagcgtagacatgatgtgcagggcggccaaggctttgctagccatggccagagtggacgaaaaccgctcggaattccttttgcacgagggccggttgctggatatctcgatatcagctgtcctgaactctctggttgcatctgtcatctgtgatgtactgtttcagattgggcagttatgacataagtgagaaggcaagcatgtgtgagtgaagattagagggtcacatataactggctgttttctgttcttgtttatccagcgtaggaagaaggaaaagaaaatctttgctcctctgccccattcactatttaccaattgggaattaaagaaataattaatttgaacagttatgaaattaatatttgctgtctgtgtgtataagtacatcctttggggttttttttttctcttttttttaaccaaagttgctgtctagtgcattcaaaggtcactttttgttcttcacagatctttttaatgttctttcccatgttgtattgcatttttgggggaagcaaattgactttaaagaaaaaagttgtggcaaaagatgctaagatgcgaaaatttcaccacactgagtcaaaaaggtgaaaaattatccatttcctatgcgttttactcctcagagaatgaaaaaaactgcatcccatcacccaaagttctgtgcaatagaaatttctacagatacaggtataggggctcaaggaggtatgtcggtcagtagtcaaaactatgaaatgatactggtttctccacaggaatatggttccattaggctgggagcaaaaacaatgttttttaagattgagaatacatacctgacaacgatccggaaactgctcctcaccactcccgtcatgcctgctgtcggcgtttgaccttccacgtgacagttcttcacaattcctttcatcattttttaaatattttttttactgcctatgggctgtgatgtatatagaagttgtacattaaacataccctcatttttttcttttcttttttttttttttttttagtacaaagttttagtttctttttcatgatgtggtaactacgaagtgatggtagatttaaataattttttatttttattttatatattttttcattagggccatatctccaaaaaaagaaagaaaaaatacaaaaaacaaaaacaaaaaaaaaagagggtaatgtacaagtttctgtatgtataaagtcatgctcgatttcaggagagcagctgatcacaatttgcttcatgaatcaaggtgtggaaatggttatatatggattgatttagaaaatggttaccagtacagtcaaaaaagagaaaatgaaaaaaatacaactaaaaggaagaaacacaacttcaaagatttttcagtgatgagaatccacatttgtatttcaagataatgtagtttaaaaaaaaaaaaaagaaaaaaacttgatgtaaattcctccttttcctctggcttaatgaatatcatttattcagtataaaatctttatatgttccacatgttaagaataaatgtacattaaatcttgttaagcactgtg

SEQ ID NO: 25 - DNA, 6992 bp, Homo sapiens
gcagcggccaaggcggcacaccggagcctccgaggcgaggggcaagtgggcgaagggaggggggacgacggctgctgccgcagcagctgaaggccaaggaattgaaagggctgtagggggaggcagtgcgagccagccccgactgctcctcctcttcctcctcctcctccaaactcgcgagccccagagctcgctcagccgccgggagcacccagagggacgggaggcagccgcgcagccccgagctgggcagtgtccccagccgccatggatagcgacgacgagatggtggaggaggcggtggaagggcacctggacgatgacggattaccgcacgggttctgcacagtcacctactcctccacagacagatttgaggggaactttgttcacggagaaaagaacggacgggggaagttcttcttctttgatggcagcaccctggaggggtattatgtggatgatgccttgcagggccagggagtttacacttacgaagatgggggagttctccagggcacgtatgtagacggagagctgaacggtccagcccaggaatatgacacagatgggagactgatcttcaaggggcagtataaagataacattcgtcatggagtgtgctggatatattacccagatggaggaagccttgtaggagaagtaaatgaagatggggagatgactggagagaagatagcctatgtgtaccctgatgagaggaccgcactttatgggaaatttattgatggagagatgatagaaggcaaactggctacccttatgtccactgaagaagggaggcctcactttgaactgatgcctggaaattcagtgtaccactttgataagtcgacttcatcttgcatttctaccaatgctcttcttccagatccttatgaatcagaaagggtttatgttgctgaatctcttatttccagtgctggagaaggacttttttcaaaggtagctgtgggacctaatactgttatgtctttttataatggagttcgaattacacaccaagaggttgacagcagggactgggcccttaatgggaacaccctctcccttgatgaagaaacggtcattgatgtgcctgagccctataaccacgtatccaagtactgtgcctccttgggacacaaggcaaatcactccttcactccaaactgcatctacgatatgtttgtccacccccgttttgggcccatcaaatgcatccgcaccctgagagcagtggaggccgatgaagagctcaccgttgcctatggctatgaccacagcccccccgggaagagtgggcctgaagcccctgagtggtaccaggtggagctgaaggccttccaggccacccagcaaaagtgaaaggcctggctttggggttcagagacctggaatagaaacttggatctatgcactacgtttatctgacaatgggacaaccagggactgctcatgctgtgacgtcacatcctctcaccatgcgttagcaacgactttctcgcatactaactaggtttgactgtattactcataccagatttaaaattagctagccttgcaacaacgtcctactgagaggtattgtcgagcatttgacataagacagcgtgatgttctttggtggttcaagtctaaatctgtaccacattcggagatgccaaatgattagactgaaacagggaaacggggtttttcagtcatttttagtcagtggtttttccatagtgcttttttcctatggccagtgcaaattgtgttagcacacttgcatatgtgccgtattaagggttgacaattactacatctttattctctaaatgtagtataatttgccttttaacctttgatctgtatcttgcaatagaatggctttggtttttttcttagtaaataggagcccacttctaaagtcatttcacccctcagccctattctctttcttagataccctttacaagagaaaacttccaaatggatttttgcatcaatagcagtgtgtaggtctctctggttctttctatatcatcattttattattatgtcctaatataaagtactggctcatagggccagggtattattatagaatattattctcgcatgtaaacaaagatatctttgctttaagatgtgagaagaaatgaatttactttgtttgcattaagttatggaagagttgtaatatatactttaagaaagaagagaagaaaactagtatctctaagcggtaactatggcaattttgcaatattttcagtagtgctagtaattttttcctccttgagtacacattaaatgtacataacatagcgcggtcaggcttgtggcacagtgcattgaattcaaaagtcaaacagcaaatttgaattctaacagaattcaaaaaaaaatttttttagtcagtactactaaggcagacacactgattactaggtacaaatcaaaccttgatgctaaaactcttcatcattgtaatttcaaagcacttacctgcttcaaaacattgtaaactaagactgaacacctgtatagtttaaaagcaacactatcaatagcatttcagccattttgccagccatgtgtaatcacaactgcagaaataaggagaaaacccctgtttttttagtttagctaattagatctgtaacatcactgggattgctctgaatgaatcctgagagttttgttttttataagcaccctcaccacatgccatagctttgtctcttttagacacctcgatgcagcggctggaaggactggagagcagctgttgtgctgatctgtagctgtcagctgtgattcctgtcacctgagtcagtttggtctggaaagcgaaggccttccaagctgtagcagatagtgagctccagctgatgagagaaggcttcagtggaagaagagtgaggacataggcagaaggaagtttgctatttcttgtcagttgcacattgctttatgaagactacaacaaaagtgcttaatcccaggctgctcatgactttcatttcaggtggcccttgggcacattgacagagttgcccttcccttctttgcaacaccaggcttcctagagcacccggttgcatgctttgcagctaggtggcagtggtttcagggagatccagttggatccctgcttgaaagcttaagccaatggttcacccatgagaggaagttgtcagtgcttccaggaagattgcccaccaaaggaactgaatagtttttagatttaaaggcaccaggatagggtcactcttactctgtagaaagagaccgttctatacactgtgacggatgggccagggcctctggacttgcattctgataggtgctttaatttaaatgtgcccaaagggagtgactgtcttcaggagaaagatggcttgcattaacctcgatcaagtgggttgtgcagccaggtcagggaatgcggtcagggagaggatagtgctggtcatgcccccgatgcagctatgctctgaatgatttcattcctgagagtgatagcattctggtcctggctgcagtggggtacaatttacgtcctaagtgggggctactctaattatcccattcaaatggaatttttttcaaaattggatagaaggaattgaagagttgtaagtagtgattagtctgctaatcagttcttcagatgagatattgaatggtaacactctgagcttaaaactcagcagtgtgtctgtgacctccacgcaaatcagaggaagcaatgcatccacgctgagcctcaccatgtcttcctcccaactctcttcatactctctgtgtcttccagctcttctttctctggccggctctctttcctcttctctctgcatatgtgagaacgcctgggcatcctgggtaacagcagccccagctgccctctcctgttccctgttccaagtcccctgcactgacctttcttgagtctctctggctctgtgcatgtctttgggactctcctcatctggcttttcctctgtgtgtgcctctctgtttgcttatgtctctggctctgtcttccccacccctcccctcacacacacacatactcccaaatgtaaggctctgtggcaggttggaatcggagtaaggcttgagattcactgagttctgtaggtagggaaagaagtcaagggagtggaggttctataaggaattaacagctgaggacggaagggtttgtttcccgtttgaacctaaacgcaagtggaaaagaatactcagaatgtatttttctactttacatctgctggggaaggaaatgtgtcaggaagccgctgcatctggtcatttcatcgcatcagaatcacagcagacgtggaagattccatgtggtggggaataaagaaataactttatgctctcctgaaaaacagcgggagcctatgtgtgtgtgcgacactgtaatctcaaggagattcactcagagctgtctcagtccaactcctgcatgaccagatcttcccttagcatcttttctgtgatgaaatattatcttgtgttagagttaggaataggaactaacctgtaggagcatgtccccaaatggacatttgaatggactaacaaaaacaactggaaagactgaatttccgacacaaaggaatgatgagatcaaaaagaaagcagtgaggagttcttgagtcttgtagtacctattcttattttaacttgcttcatccttgatctacctgagacactaagaaggaaattagttttccaagagctctttgaacctgtctaggactgtagttaaacctatttgccctatgggggttcttcacactcgaaaaactatttccttatcaccaacgacccacccagaaaggccaatgaggccaaatgtaacaatttttaacatttaaatataactattaaaattgcattaattgtgaacagtgaattaaagggttgtcttctccaggagacagtatgtggcacttttcgtaaatttcatttaatatataaaaatttaaatcactcactgcaacatgcatttaaaatcttccaagaaggtagaggtatcattttctgttttgctttgttttaaaacagttgcctcaagcttctgtcttaagagtagtgacttagaatccagatatcttttgttttagaaaaacaagcaaaactatgttgcaagactgacagttgtaatgtttatttgccacagatcaaaggttcacaaagtatatcaaatttacatctacttggggtaccttgatagattattattgtttttcttttatctttcccttcaggaatttggaaactcgttgtcactttttttaattttaaaaatactaaattgtaatagttttcttttgccaaatgtgtgcgtacatattcaaagcaatgaaactatttcaagccatacaaccacaggggtgggaacccttttcacaaattttaatgtgtttgtatgtaaatagatgtttgtatgaaatattttcatgatagaatgaatatatttaaatgaagttgaattattccagtgctacttaaacacattacaaaaattttggtgagaattatctgagtctattgagatgtaatgcagatcaattttgatttttaaaaatcaaaagcctacaataactctgactctcagcaacttcctcggcgttgttgcacctgacgtggagagagctcgtaggcttccccagtgcctcagccgcttcctggtggaagttaggtgctaatggaggtgtgttcaccttttagtgatatcactgcaggcctttgaggggcctgagagtgaatcagaggcattagagacaccggtgcagttatctggagcacaatttctttgcagggcagcagaatcagaagccagacttggccatgtgaacctcgaaactcggtttcccggccgccatcaaccgccacccttactgcctagtcacacacgtcagggaggctgccctcagtggagttggggttgagaccccagggtgggacttcacagttttgccagcaatctctaccttctgacttctgcctcgcagagaggaaggagaggggagcatctggcaaggggcccatttctcagcacagtacatttcctgtctcagctctggaagactatgcacccaagcaccaaacttccaaccagagagagagacgtcctccgataacaaaaatccttgcttcctctgtctgtgactttacacacagttgttcaaagttgttaaatgtcaagagtcaatcacatccctaggacatacctcccaactctcctgactcttatgttattgaaaaaacaaacaaacaaaaactcctttatgatgatattcaacttgagtggggttttttttccactttggtcctggatataatgaaatgatacatattaggataaattttcactgtgtatagtagcaatacgaacacacatgccaatgtatcaacatatctacttggttacattttggtttatgataattaaccttgattcatgtattgggaagctacagggactacgtaatacctgcttatcacataggaaaattatgtccatgattctgagctcccttcttcaaaagtttcctcctgggtgttctatgttctctctttatcctgaaatacatttattaggttgtgaggtatgttgaagaagtagaagccaggggtatgctttcagcatttattgcaaccaaaagttaaccccatcacggttaacgagcatctttggtctcttgtggaatttgaactaaaactatgagccttattcaatatctataattctatgatttttttaaattatgggaaattaatgaaagatgtttacatgaataatgtttgcccttactgtgttatgaatgagttttttgtagtgtgtctgggtgcatgatgcaagagagtaggaaaaatgtttctgaaacaaaacttgacaaatatttgtaatgaaagtaaatttaaagattgctataattgcgctatagaaacaatgcaagtattaaacaaaatatacaatc

SEQ ID NO: 26 - DNA, 2707 bp, Homo sapiens
ctacgcgcggggcgggtgctgcttgctgcaggctctggggagtcgccatgcctacaacacagcagtcccctcaggatgagcaggaaaagctcttggatgaagccatacaggctgtgaaggtccagtcattccaaatgaagagatgcctggacaaaaacaagcttatggatgctctaaaacatgcttctaatatgcttggtgaactccggacttctatgttatcaccaaagagttactatgaactttatatggccatttctgatgaactgcactacttggaggtctacctgacagatgagtttgctaaaggaaggaaagtggcagatctctacgaacttgtacagtatgctggaaacattatcccaaggctttaccttttgatcacagttggagttgtatatgtcaagtcatttcctcagtccaggaaggatattttgaaagatttggtagaaatgtgccgtggtgtgcaacatcccttgaggggtctgtttcttcgaaattaccttcttcagtgtaccagaaatatcttacctgatgaaggagagccaacagatgaagaaacaactggtgacatcagtgattccatggattttgtactgctcaactttgcagaaatgaacaagctctgggtgcgaatgcagcatcagggacatagccgagatagagaaaaaagagaacgagaaagacaagaactgagaattttagtgggaacaaatttggtgcgcctcagtcagttggaaggtgtaaatgtggaacgttacaaacagattgttttgactggcatattggagcaagttgtaaactgtagggatgctttggctcaagaatatctcatggagtgtattattcaggttttccctgatgaatttcacctccagactttgaatccttttcttcgggcctgtgctgagttacaccagaatgtaaatgtgaagaacataatcattgctttaattgatagattagctttatttgctcaccgtgaagatggacctggaatcccagcggatattaaactttttgatatattttcacagcaggtggctacagtgatacagtctagacaagacatgccttcagaggatgttgtatctttacaagtctctctgattaatcttgccatgaaatgttaccctgatcgtgtggactatgttgataaagttctagaaacaacagtggagatattcaataagctcaaccttgaacatattgctaccagtagtgcagtttcaaaggaactcaccagacttttgaaaataccagttgacacttacaacaatattttaacagtcttgaaattaaaacattttcacccactctttgagtactttgactacgagtccagaaagagcatgagttgttatgtgcttagtaatgttctggattataacacagaaattgtctctcaagaccaggtggattccataatgaatttggtatccacgttgattcaagatcagccagatcaacctgtagaagaccctgatccagaagattttgctgatgagcagagccttgtgggccgcttcattcatctgctgcgctctgaggaccctgaccagcagtacttgattttgaacacagcacgaaaacattttggagctggtggaaatcagcggattcgcttcacactgccacctttggtatttgcagcttaccagctggcttttcgatataaagagaattctaaagtggatgacaaatgggaaaagaaatgccagaagattttttcatttgcccaccagactatcagtgctttgatcaaagcagagctggcagaattgcccttaagactttttcttcaaggagcactagctgctggggaaattggttttgaaaatcatgagacagtcgcatatgaattcatgtcccaggcattttctctgtatgaagatgaaatcagcgattccaaagcacagctagctgccatcaccttgatcattggcacttttgaaaggatgaagtgcttcagtgaagagaatcatgaacctctgaggactcagtgtgcccttgctgcatccaaacttctaaagaaacctgatcagggccgagctgtgagcacctgtgcacatctcttctggtctggcagaaacacggacaaaaatggggaggagcttcacggaggcaagagggtaatggagtgcctaaaaaaagctctaaaaatagcaaatcagtgcatggacccctctctacaagtgcagctttttatagaaattctgaacagatatatctatttttatgaaaaggaaaatgatgcggtaacaattcaggttttaaaccagcttatccaaaagattcgagaagacctcccgaatcttgaatccagtgaagaaacagagcagattaacaaacattttcataacacactggagcatttgcgcttgcggcgggaatcaccagaatccgaggggccaatttatgaaggtctcatcctttaaaaaggaaatagctcaccatactcctttccatgtacatccagtgagggttttattacgctaggtttcccttccatagattgtgcctttcagaaatgctgaggtaggtttcccatttcttacctgtgatgtgttttacccagcacctccggacactcaccttcaggaccttaataaaattattcacttggtaagtgttcaagtctttctgatcaccccaagtagcatgactgatctgcaatttaaaattcctgtgatctgtaaaaaaaaaa

SEQ ID NO: 27 - DNA, 931 bp, Homo sapiens
ttgctttcctctgccgcatggtcctgggccgttggcgtcggaagcctgaagcatgggcgctgagtgggagctgggggccgaggctggcggttcgctgctgctgtgcgccgcgctgctggcggcgggctgcgccctgggcctgcgcctgggccgcgggcagggggcggcggaccgcggggcgctcatctggctctgctacgacgcgctggtgcacttcgcgctggaaggcccttttgtctacttgtctttagtaggaaacgttgcaaattccgatggcttgattgcttctttatggaaagaatatggcaaagctgatgcaagatgggtttattttgatccaaccattgtgtctgtggaaattctgaccgtcgccctggatgggtctctggcattgttcctcatttatgccatagtcaaagaaaaatattaccggcatttcctgcagatcaccctgtgcgtgtgcgagctgtatggctgctggatgaccttcctcccagagtggctcaccagaagccccaacctcaacaccagcaactggctgtactgttggctttacctgtttttttttaacggtgtgtgggttctgatcccaggactgctactgtggcagtcatggctagaactcaagaaaatgcatcagaaagaaaccagttcagtgaagaagtttcagtgaactttcaaaaccataaacaccattatctaacttcatgaaccagaatgaatcaaatctttttgtttggccaaaatgtaatacattccagtctacactttgtttttgtattgttgctcctgaacaacctgtttcaaattggttttaaggcgaccagttttcgttgtattgttgttcaattaaatggtgatatagggaaaagagaacaaatttgaatttgtaataataaaatgtttaattatacaaaaaaaaaaaaaaaaa

SEQ ID NO: 28 - DNA, 4196 bp, Homo sapiens
caatgctacatatgtacagcctagaagaaaacagagagatgagcagcttctgacaaatgtcctggaaacacttcgaggtgatggaaatgtgttaatagcagtggacacagcaggcagagttttggaacttgctcaacttcttgatcagatttggaggactaaagatgcaggattgggtgtttactcattggcactcctaaataatgtcagttacaatgtggtggagttttctaagtcccaggtagaatggatgagtgataaattgatgagatgttttgaagacaaaagaaataatccgtttcagtttcgccatctctctttatgtcatggtctttctgacttggcccgtgtacctagccctaaagttgtacttgccagccaacctgacctggaatgcggattttcaagggatctctttattcagtggtgtcaggaccctaaaaactcaatcattctaacctacagaactactcctgggactttagcacgtttcctaattgataatccttctgaaaaaattacagaaatagagttgaggaaacgtgtgaagcttgaagggaaagaacttgaagaatacttggaaaaagagaaactaaagaaagaagctgccaaaaagcttgagcagtcaaaagaggcagatatagattccagtgatgagagtgatattgaggaagatattgaccagccatcagctcataagacgaagcatgacttgatgatgaaaggtgaaggcagtcgtaaaggaagttttttcaaacaggcaaaaaagtcctatcctatgtttcctgccccagaagaaagaattaaatgggatgaatatggagagattatcaaaccagaggatttcttagtgccagagcttcaagctactgaagaagaaaaaagcaaattagaatctggtttgacaaatggagatgaacctatggatcaggatttatctgatgttcctactaaatgtatttctacaacagagtctattgaaataaaagcccgggttacctacatagactatgaaggacgctctgatggggattccattaaaaaaatcattaatcagatgaaaccacgacagttgatcatcgtccatggcccaccagaggccagtcaagatctggcagagtgctgtcgcgcctttggtgggaaagatattaaagtgtacatgccaaagctacatgaaacagttgatgccactagtgaaactcacatctaccaggtgaggttaaaagactcacttgtcagctctcttcagttttgtaaggcaaaagatgctgaattagcttggatagatggtgtcttagatatgagagtttccaaagtggacacaggggttattttagaagaaggagaactaaaggatgatggagaagactcagagatgcaagtggaagctccctcagattctagcgttatagcacaacaaaaggccatgaaaagtctgttcggagatgatgaaaaagaaacaggtgaagaaagtgagatcattcctactttggaacccttgccacctcatgaggttcctggacatcagtcagtttttatgaatgaaccaaggctgtcagacttcaagcaagttctcttacgggaggggattcaagctgaatttgtaggaggtgtacttgtttgcaacaatcaagtagcagtccgcagaacggaaactggacgcattggattagaaggctgcctttgtcaagatttttataggataagagaccttttatatgaacaatatgccattgtataaaggacatgatgtcaagaagtatctgcttgacctttctaagaaaaagggattcttatcttactctgagcttttgatgttttgttttgtaacatacaaaaagaatctgccagaaaaacttacatgtatcagatttttaaaaatataaatagagaacattttgcaaatgctcaaatgagcattctatcttttggctttcagagtgatagagctcctaacaggtgtacaggcccaagagttgaaggtgattggttttctttacagactccttgttctctagaagggctttttacttgaataaaacaatgcaacttagcaaaccaatttatggccttagagaaacatttttgcatgagttcttacaaactgtttgttatattttctggaatgataagtgagaattatttagaaaagacatgctccaaaaaaaaaacaaaactgataaaacagtttttcgaaacttacttttaaaagcatacgtgctatgactctctccagtttgaatatgcaattgttttcacaggcaggatgtctgttttctgcctgtatttcccagtgatttactctagggtaaggtagtacacatttggttcagaaattaatttttatttctcctatatcttgttttatcaagattttgttgtggcatttcaatgtaaattataacaccatcatttgagtatacataattcaaaagaactacttgatgcagtatagtcttaagggttctgcatacattttagaaacatcttagccgtaagttaggtcctgtgttaaactgtttagtgctctgtttttaagaaaacaaatgttgaacctcacacttttatgtggtgacagtgtaatttaattaaaaggtgtaaatgttttcatctcttaggcttgctgtctcctaaggtcacccaagcagtggttggattttatacacattactactaaaataatactgaagttggataaggttatcctttctgtatttgcgtctttcttgtgactaaccaccctgatatagtattaaccactgtgttcaagagtaaaaacaatatatgcaattttcattgaacttaaagagtgaaaaccatgtaaactattgaaactattgtaatccattaatgcttttttagaatggcagaccttgatgtttatttctcaaatggttaagccctcttctttactcttaatttttttttgagacagagtcacccaggctggagtgcagtggtgagattttggctcactataacctcttcctccagggttcaagtgattctcccacctcagcctcccaagtagctgggactacgggcacatgccactgcacctggctaatttttatatttttggtagagacagggtttcaccatgttggccaggctggtctcaaactcctgacctcaagcgatccacccacctaggcctcccaaagtgctgggattacaggcatgaatcaccacaactagcctacccttagatttttggaaggatcgatcttatttaactatgtgtggaacaacccagtaatatcagactcgaattactatttcattctatttcaaatgcttataaagctactattgtagattatagtgttaatgcaaagtttacagacttttgatatggaaaaccagataaaacaatgttacaaaaggcaaatataaagagtatgttttctttttagtgctttggaaaaatttcacttaaactcttattactgtatagattaagccctataatgctatttatattccaggggaacgaaaatctgaatttgttttatgatttaaagcatctggtttgcatattgtattgtaatactgatacagtttggctgtgtccccaccaaattgaattgtgttaatagttcccataatccctacgtgttgtgggagggacccagtgggcagtaatttaatcatggtggtggttaccctcatgctgttcttgtgatggtgagttctcatgagatctgatgggtgtttttttttgttttgttttttgttttttgagatggagttttgctcttgttgcccagactggagtgcaatggcacacgatctcggctcaccgcaacctctgcctcctgggttcaagcgattctcctgcctcagcatctcgagtagctgggattacaggcatgcaccaccacgcccagctaattttgtatttttagtagagacggggtttctccatgttggttaggctggcctcaaactcccgacctcaggtgatccgcccgcctgggcctcccaaagtgctgggattacaggcgtgagccactgctcctggcccaagatctgatggttttgtaagggaattttccccctttgcttggcacttcttcctgctgccatgtgaagaaggatgtgtttgcttccccttccaccatgattgtaagtttcatgaggcctccccagcctgtgggactgtgagtcaattaaacgtgtttactttataaatt

SEQ ID NO: 29 - DNA, 3254 bp, Homo sapiens
ggtaactgcagtaagtcccgcttggccctggagtccacgcggattttcgaagctggggctggcaagaggccgctggacaccacgctccagtcgtcagcccacttcctagctgaacagcgcgaggcggcggcagcgagccgggtcccaccatggccgcgaattattccagtaccagtacccggagagaacatgtcaaagttaaaaccagctcccagccaggcttcctggaacggctgagcgagacctcgggtgggatgtttgtggggctcatggccttcctgctctccttctacctaattttcaccaatgagggccgcgcattgaagacggcaacctcattggctgaggggctctcgcttgtggtgtctcccgacagcatccacagtgtggctccggagaatgaaggaaggctggtgcacatcattggcgccttacggacatccaagcttttgtctgatccaaactatggggtccatcttccggctgtgaaactgcggaggcacgtggagatgtaccaatgggtagaaactgaggagtccagggagtacaccgaggatgggcaggtgaagaaggagacgaggtattcctacaacactgaatggaggtcagaaatcatcaacagcaaaaacttcgaccgagagattggccacaaaaaccccagtgccatggcagtggagtcattcatggcaacagccccctttgtccaaattggcaggtttttcctctcgtcaggcctcatcgacaaagtcgacaacttcaagtccctgagcctatccaagctggaggaccctcatgtggacatcattcgccgtggagactttttctaccacagcgaaaatcccaagtatccagaggtgggagacttgcgtgtctccttttcctatgctggactgagcggcgatgaccctgacctgggcccagctcacgtggtcactgtgattgcccggcagcggggtgaccagctagtcccattctccaccaagtctggggataccttactgctcctgcaccacggggacttctcagcagaggaggtgtttcatagagaactaaggagcaactccatgaagacctggggcctgcgggcagctggctggatggccatgttcatgggcctcaaccttatgacacggatcctctacaccttggtggactggtttcctgttttccgagacctggtcaacattggcctgaaagcctttgccttctgtgtggccacctcgctgaccctgctgaccgtggcggctggctggctcttctaccgacccctgtgggccctcctcattgccggcctggcccttgtgcccatccttgttgctcggacacgggtgccagccaaaaagttggagtgaaaagaccctggcacccgcccgacacctgcgtgagccctaggatccaggtcctctctcacctctgacccagctccatgccagagcaggagccccggtcaattttggactctgcactccctctcctcttcaggggccagacttggcagcatgtgcaccaggttggtgttcaccagctcatgtcttccccacatctcttcttgccagtaagcagctttggtgggcagcagcagctcatgaatggcaagctgacagcttctcctgctgtttccttcctctcttggactgagtgggtacggccagccactcagcccattggcagctgacaacgcagacacgctctacggaggcctgctgataaagggctcagccttgccgtgtgctgcttctcatcactgcacacaagtgccatgctttgccaccaccaccaagcacatctgtgatcctgaagggcggccgttagtcattactgctgagtcctgggtcaccagcagacacactgggcatggacccctcaaagcaggcacacccaaaacacaagtctgtggctagaacctgatgtggtgtttaaaagagaagaaacactgaagatgtcctgaggagaaaagctggacatatactgggcttcacacttatcttatggcttggcagaatctttgtagtgtgtgggatctctgaaggccctatttaagtttttcttcgttactttgctgcttcatgtgtactttcctaccccaagaggaagttttctgaaataagatttaaaaacaaaacaaaaaaaacacttaatatttcagactgttacaggaaacaccctttagtctgtcagttgaattcagagcactgaaaggtgttaaattggggtatgtggtttgattgataaaaagttacctctcagtattttgtgtcactgagaagctttacaatggatgcttttgaaacaagtatcagcaaaaggatttgttttcactctgggaggagagggtggagaaagcacttgctttcatcctctggcatcggaaactcccctatgcacttgaagatggtttaaaagattaaagaaacgattaagagaaaaggttggaagctttatactaaatgggctccttcatggtgacgccccgtcaaccacaatcaagaactgaggcctgaggctggttgtacaatgcccacgcctgcctggctgctttcacctgggagtgctttcgatgtgggcacctgggcttcctagggctgcttctgagtggttctttcacgtgttgtgtccatagctttagtcttcctaaataagatccacccacacctaagtcacagaatttctaagttccccaactactctcacacccttttaaagataaagtatgttgtaaccaggatgtcttaaatgattctttgtgtaccttttctgtcatattcagaaaccgttttgtgcctgctgggagtaattcctttagcaattaagtatttggtagctgaataaggggtcagaacttctgaaaccagagatctgtaatcatctctattggcctggggtgcctgtgctataaatgagtttcttcacatgaaaaacacagccagcccaagatgacttatctgggtttaggattcaatagtattcactaactgcttattacatgagcaatttcatcaaatctccaaactcttaaaggatgctttcggaaaacacgctgtatacctagatgatgactaaatgcaaaatccttgggctttggtttttttctagtaaggattttaaataactgccgacttcaaaagtgttcttaaaacgaaagataatgttaagaaaaatttgaaagctttggaaaaccaaatttgtaatatcattgtattttttattaaaagttttgtaataaatttctaaattataaaaaaaaaaaaaaaaaa

SEQ ID NO: 30 - DNA, 1378 bp, Homo sapiens
atgctaaaactaatcgtcccaacaattatattactaccactgacatgactttccaaaaaacacataatttgaatcaacacaaccacccacagcctaattattagcatcatccctctactattttttaaccaaatcaacaacaacctatttagctgttccccaaccttttcctccgaccccctaacaacccccctcctaatactaactacctgactcctacccctcacaatcatggcaagccaacgccacttatccagtgaaccactatcacgaaaaaaactctacctctctatactaatctccctacaaatctccttaattataacattcacagccacagaactaatcatattttatatcttcttcgaaaccacacttatccccaccttggctatcatcacccgatgaggcaaccagccagaacgcctgaacgcaggcacatacttcctattctacaccctagtaggctcccttcccctactcatcgcactaatttacactcacaacaccctaggctcactaaacattctactactcactctcactgcccaagaactatcaaactcctgagccaacaacttaatatgactagcttacacaatagcttttatagtaaagatacctctttacggactccacttatgactccctaaagcccatgtcgaagcccccatcgctgggtcaatagtacttgccgcagtactcttaaaactaggcggctatggtataatacgcctcacactcattctcaaccccctgacaaaacacatagcctaccccttccttgtactatccctatgaggcataattataacaagctccatctgcctacgacaaacagacctaaaatcgctcattgcatactcttcaatcagccacatagccctcgtagtaacagccattctcatccaaaccccctgaagcttcaccggcgcagtcattctcataatcgcccacgggcttacatcctcattactattctgcctagcaaactcaaactacgaacgcactcacagtcgcatcataatcctctctcaaggacttcaaactctactcccactaatagctttttgatgacttctagcaagcctcgctaacctcgccttaccccccactattaacctactgggagaactctctgtgctagtaaccacgttctcctgatcaaatatcactctcctacttacaggactcaacatactagtcacagccctatactccctctacatatttaccacaacacaatggggctcactcacccaccacattaacaacataaaaccctcattcacacgagaaaacaccctcatgttcatacacctatcccccattctcctcctatccctcaaccccgacatcattaccgggttttcctctt

SEQ ID NO: 31 - DNA, 5742 bp, Homo sapiens
gcggctgccgggcctccaatctcggcggcggcggcggcaacaggggagcctgggtctcgcggcctgcgagtccgtcgcgtgctgagggagacgcaggaggtggagccggccgggtgctcgagggaaggagactggaagctggttccggcgtgagggagagtctgaaaaaggggagcgcggagaggaggctggaagaggaagatgcctagcacagaccttctgatgttgaaggcctttgagccctacttagagattttggaagtatactccacaaaagccaagaattatgtaaatggacattgcaccaagtatgagccctggcagctaattgcatggagtgtcgtgtggaccctgctgatagtctggggatatgagtttgtcttccagccagagagtttatggtcaaggtttaaaaagaaatgttttaagctcaccaggaagatgcccattattggtcgtaagattcaagacaagttgaacaagaccaaggatgatattagcaagaacatgtcattcctgaaagtggacaaagagtatgtgaaagctttaccctcccagggtctgagctcatctgctgttttggagaaacttaaggagtacagctctatggacgccttctggcaagaggggagagcctctggaacagtgtacagtggggaggagaagctcactgagctccttgtgaaggcttatggagattttgcatggagtaaccccctgcatccagatatcttcccaggactacgcaagatagaggcagaaattgtgaggatagcttgttccctgttcaatgggggaccagattcgtgtggatgtgtgacttctgggggaacagaaagcatactgatggcctgcaaagcatatcgggatctggcctttgagaaggggatcaaaactccagaaattgtggctccccaaagtgcccatgctgcatttaacaaagcagccagttactttgggatgaagattgtgcgggtcccattgacgaagatgatggaggtggatgtgcgggcaatgagaagagctatctccaggaacactgccatgctcgtctgttctaccccacagtttcctcatggtgtaatagatcctgtccctgaagtggccaagctggctgtcaaatacaaaataccccttcatgtcgacgcttgtctgggaggcttcctcatcgtctttatggagaaagcaggatacccactggagcacccatttgatttccgggtgaaaggtgtaaccagcatttcagctgacacccataagtatggctatgccccaaaaggctcatcattggtgttgtatagtgacaagaagtacaggaactatcagttcttcgtcgatacagattggcagggtggcatctatgcttccccaaccatcgcaggctcacggcctggtggcattagcgcagcctgttgggctgccttgatgcacttcggtgagaacggctatgttgaagctaccaaacagatcatcaaaactgctcgcttcctcaagtcagaactggaaaatatcaaaggcatctttgtttttgggaatccccaattgtcagtcattgctctgggatcccgtgattttgacatctaccgactatcaaacctgatgactgctaaggggtggaacttgaaccagttgcagttcccacccagtattcatttctgcatcacattactacacgcccggaaacgagtagctatacaattcctaaaggacattcgagaatctgtcactcaaatcatgaagaatcctaaagcgaagaccacaggaatgggtgccatctatggcatggcccagacaactgttgacaggaatatggttgcagaattgtcctcagtcttcttggacagcttgtacagcaccgacactgtcacccagggcagccagatgaatggttctccaaaaccccactgaacttggaccctttctagtctcaaggggattccagccttcagaaggttcttgggatatggaacaggccgtgcacaactttgacatctggtcttgctccatagagcacaactcaagatagaccatgagacagcttgagcctcaggattcttgttcttcctcttatcttccttttgtggtttttaatttgaagaccccagagaattccattacataatgattttgcccttgttataaatgttaccctaggaattgttttaaccatttccttttctaaactctctagctttcaactttacttaaacattgtgtggtagctctgacctgtcctgattctttagagaagctggggtacagtttatgagatagctagagcttctttgttatctcaggcaggaggcgtttacataacagatgtttcctcagctgggtgtgaggtatactctaagcaggaggctttttcagccttctctctcttttttttttttttttttttttgagatggaattttgctcttttgcccagtctggagtgcagtggcatgatctcagctcactgcaacctccacccactgggttcaagcgattcttctgcctcagcctcccgagtagctgggattaccggcacccaccaccacgcctggctaatttttcaattttctttttcagtagagacgggttcaccgtgttggccaggctggtcttgaactcctgacctcaggtgatacccgcccccccgcctcagcctcccaaagtgctgggattacaggcgtgagccaccgtgcctggccctgtctctcttaagagtaggttcattgtctgtcttagagtcacttctattgcaactcattttctttttccagggcacagatcgaccaagctgccgttccctattctgcaggacaggactattctagcatacctgcttcgtccacccaggcagggtttggggtggtctcttctgtgcctgcagtccccatttgacacttggttgccaccatctttggagattattgtttggaatgatgcttccattggctttttcttgttaccatggactaggaagaaaacatggtttccaaataatctgggagcttttggccatggtgccgccttcctgaattggcagtggtcagagcacacctgaaccctatcctgggctggtgatgagcagaaatcagacctttttctatgcttttttgaatatcagagtaggatgaacacccagattcaaatatgtcaccaaagttggtggtggtccttccctgcacccttgcgttaagccattatgtaatgaaaatgtgtttgcttgaaggaacagctcaaagcaccttcacaagttgccttgacttaccctaggtgggtgtgaaagagcacccgtagcaaggaaaattttctctattagtgtgttcttctgcctcttcccccttgattcagctttcagaggtactatggcagttttgcctcaggtgctgaacatttctcagccctggctaaaagggagcagcacagggagagaaacaggataggaaagcagaatggcgagcagcctatggcccagggcctgtaatcccttcccaagactagctgctcagggtggtgcagggacaggaccagaccctgcgcctatttcctgccttctttcccctatagggaactctgtaggctgagccactgtcctgctcttatgacattatatcttgtgcctttctcctcagcagtgagcagtgagctactcctggcccaggccctaggggaaatggatcagtctttgaggtttctatttggggaggggagtacttaagatgagtcaaaagacactttcctctgttccattccccatctcagggactcctgaatattcagcctctccaggctggtgtcttctagtttcccccactgggaatgctggctgggagagccatgactaccagacttttcctcaggctccttggcatgttagtctgaattgttcttgagcactgtactactgacccaacaactgtgactagctggccacgccattcagggctggtgtggcatttatgtgtgtgtgtgtgtgtgtgtgtttttcctgtttgcccagcagtgcattgtgggttccaagagtgggtagtgtgtgtatgtgtgtgtgtcagagggagacctggcaggcacctctttgagagtagctgtggtcagagctgtttggtcagtgcattatgttgaatgaggtccaggaacccagagccacccagcagacaccactgtggcttgccagctgccaagatggagaagcatgtgcccctgtagagcgtctccccagaaccagaccccgagccactcgcttcctctgtgctgtgacaacattggtgccaggggagatggtgtttttcaaagggacctactgtagccactttaatttacaattaagagccttagtttgacttaacacttttgtaggcttttcattgtgtatttttgtgtatgtgtgcatatagcagctactctgtagcagaggtgggtagagacacttaatagtatcatgtcgcatgcagatgtcacatcggcctctgcaaaaactgtactgtcttgtttctgcattagacttaagtagtcatgtgaatatactgctatgtcacttttaatattacgagttttatacttggaaaatggtacttgcttcttttaaatctctgtcttctctaacctcccccttcccatttcaatgctcccttcctaatttcagcaataatctcaaaaagcaattaaatagttaaatgaccctaattgtaattactgtggatggttgcattcatttgattacttgggcacacacgagatgacaaatggggcagtggccatgcttgaatgggctcctggtgagagattgccccctggtggtgaaacaatcgtgtgtgcccactgataccaagaccaatgaaagagacacagttaagcagcaatccatctcatttccaggcacttcaataggtcgctgattggtccttgcaccagcagtggtagtcgtacctatttcagagaggtctgaaattcaggttcttagtttgccagggacaggccctatcttatatttttttccatcttcatcatccacttctgcttacagtttgctgcttacaataacttaatgatggattgagttatctgggtggtctctagccatctgggcagtgtggttctgtctaaccaaagggcattggcctcaaaccctgcatttggtttaggggctaacagagctcctcagataatcttcacacacatgtaactgctggagatcttattctattatgaataagaaacgagaagtttttccaaagtgttagtcaggatctgaaggctgtcattcagataacccagcttttccttttggcttttagcccattcagactttgccagagtcaagccaaggattgcttttttgctacagttttctgccaaatggcctagttcctgagtacctggaaaccagagagaaagaggatccaggatgtacttggatgaggaggcctggcttatctaggaagtcgtgtctggggtgcttattgctgctccatacagctgtacgtcagccccttggccttctctgtaggttcttggcagcaatgagcagctttcactcagtgacacaagtaattactgagtcctaatttgatagccaccaactgtacctgggtaggcaaagtcagatttttgagaacctttttcctgatttgaagttttaattaccttattttcttttatgctttcctctgtcttgtaatcttttctcttcttaatatccttccctataatttcaattatttggattaattttagaataaacctatttatttct

SEQ ID NO: 32 - DNA, 4408 bp, Homo sapiens
agcttaagtggtgtctcttagccagtggacaggctgtcctgaatgaaactgaccttgctacccttatattgaacatgttgatcacaatgtgtggatattttccaagcagggatcaagacaatgccatcattcggcctctacccaaagtgaaaagactgctgtcagatagcacttgccttccccatattattcagctactgctgacctttgaccctatccttgttgagaaggttgctattttgttataccatatcatgcaagataacccacagttaccccgcctttatctgagtggagtatttttctttatcatgatgtacacaggttccaatgtgcttcctgttgctcgatttttgaaatacacacataccaaacaggctttcaagtcagaagagacaaaaggacaagatatttttcagagaagtatacttgggcacattctacctgaagcaatggtttgttacttagaaaattatgaacctgaaaagttttctgagatttttctaggagaatttgatactccagaagcaatctggagcagtgaaatgaggcgcctgatgatagagaagattgctgcccatctcgcggatttcacacctcgtcttcagagtaacacaagagcactttatcagtattgccccattcctataatcaactatccacaactcgaaaatgaactattttgtaatatttattacctcaaacaactgtgtgatacactccggtttccagattggccaattaaagacccggttaagcttctaaaagatacccttgatgcctggaagaaagaagtagaaaagaagccacctatgatgtcaatagatgatgcttatgaagtgcttaatctgcctcaaggacagggaccgcatgatgagagcaagattaggaaagcttacttcagacttgcacaaaagtaccaccctgataagaatccagaagggagggacatgtttgaaaaagtaaataaagcatatgaatttttatgtaccaaatcagcaaaaatagtggatgggccagatccagagaatataattttaattctaaaaacacagagcatcctcttcaaccgtcataaagaagatttacagccttataaatatgcaggataccccatgcttattcggactataacaatggaaacttcagatgacctccttttctcaaaagaatcaccattgttgcctgcggctacagagctagctttccatactgtcaactgttcagccctcaatgctgaagagctcagaagagagaatggactagaggtgttacaagaggcatttagtcgctgtgtggctgtcttgactcgtgctagtaaaccaagtgacatgtcagtacaggtgtgtggatacataagtaaatgctacagtgtggctgctcagtttgaggaatgccgagagaagatcacggaaatgcctagcatcatcaaggatctctgtcgggtactatattttggcaagagtattccccgcgtagctgctcttggggtagaatgtgtcagttcttttgctgtggatttctggctacagacacacctatttcaggctggaattttgtggtatctccttggttttctgtttaattatgactacacactagaagagagtggcattcagaaaagtgaagaaacaaaccagcaggaggtagcaaacagccttgccaaactgagtgtccatgctctgagtcgccttggagggtatttggctgaagaacaagcaactccagaaaatccaaccataaggaaaagcttagctggcatgctgacaccctatgttgctagaaaacttgctgtggctagtgtgactgagattttgaagatgcttaacagcaacacagaaagtccatatttgatatggaacaattctacaagagcagaattacttgaatttcttgaatcccaacaagaaaacatgattaaaaaaggtgattgtgacaaaacttatggatcagaatttgtctacagtgatcatgccaaagaacttattgtaggggagatttttgttagggtgtataatgaagttcctactttccaactggaggttccaaaagcatttgctgcaagtctcttggattatataggctcgcaggcccaatacttgcacacattcatggccatcacacacgcggcaaaagtggagtcagagcaacatggagatcgcttaccgagagtagaaatggctttggaggctctgagaaatgtcataaaatacaatccaggttctgagagtgaatgcattgggcactttaagttgatattttctcttctccgagttcatggagctggtcaagtgcagcagttggctttagaggttgtgaatatagtgacatctaaccaagactgtgtcaacaatattgctgaatcaatggttttgtccagtttattggctcttctacattcattgccatcaagtcgtcagcttgttctggaaactctttatgctttgacatcgagtacaaaaataatcaaagaagcaatggcaaagggtgctttgatctatttactggatatgttctgcaattcaacacatccacaggttcgagcccaaacagcagaactttttgccaaaatgacagcagataaactgataggtccaaaggttcgaattacgttaatgaaatttctaccaagcgttttcatggatgctatgagagacaatcctgaagctgctgtacatatttttgaaggaactcatgaaaatcctgagttaatttggaatgataattccagagataaagtgtccacaacagttagggaaatgatgctagagcactttaaaaatcagcaggacaaccctgaggcaaactggaagttgcctgaagattttgctgtggtgtttggagaagcagagggtgaacttgctgttggaggagtcttcttgaggatctttattgcacaaccagcctgggttctaagaaagcctagagaatttcttattgccctgttagaaaaattaactgagctcctagagaagaacaatcctcatggagaaactctggaaaccttgacaatggcaacagtgtgtctcttcagcgcacaacctcagctggcagatcaggtcccgccattgggccatcttcccaaagttatccaggcaatgaatcataggaacaatgccattcctaagagtgccattcgggttatccatgccttgtctgaaaatgagctgtgtgttcgagccatggcatctttagagaccattggcccactgatgaatggaatgaaaaagcgagcagatactgttggtctagcctgtgaagcaattaatcgaatgtttcagaaggagcagagtgaattagtagcacaagccctgaaagcagatttggttccatacctcttaaaattactcgaaggcattggccttgaaaacctggacagcccagcagccactaaggctcagattgttaaagctctcaaggcaatgactcgaagtttgcagtatggagaacaggtgaatgaaatcctgtgccgttcttcagtctggagtgccttcaaagatcagaaacatgatttgttcatttctgagtcacaaacagcaggatacctcacaggacctggagttgctggctaccttaccgcaggtacatctacatcagtcatgtctaacctgccacctcctgtagaccatgaggcaggcgaccttggctatcagacttgaaatattcacgagagacaataaacgctgaaaggccagtgccaagtccacattcctccagctgatacgttgaagcaaactcttactgcctttctcctggtttcatgacagtgttattcctttttctataaatatatttttaggaaaaaaagtcagtgatcctaattgtatcacattataagaaagcactctgtggatcaacataagtgggtacacaagaattttttttttcttggtgtatgtaagcacatttgttcctttatatctgtttacaaaactgtgaatcaaaaagacaaaactttcttcctagtttttgtaattttttttttgaactagcatgactgtagggttgagctacagtcaacaaaaattgggctaagtcacttttccccaggaaagaatatttccctctcctgcatcaagtctgcgtggccatcctccccccaccatccaagactattaggttttgtccctgcacccttcactggcatcctcaatcattaaccttctgaaagctcacagtacacattagtatgtataactggctttaccaaattgaatgaaaaggagcttgtgcaaaaaaatttaaaaatggatgtcaagatgttatgtaaaagatgagtgtaattgtgaaatgttctatacactatcaaatatataaagctttctatattgaatgtacattatacagatcattcatatgtgtacataaaattttaaaaataaagggaattgactgctttgttaatgag

SEQ ID NO: 33 - DNA, 592 bp, Homo sapiens
ttcggcacagggccggagagcaagagcggggaggaggagaggtcggaatgtctccaggagcccttagagaccgagtcccggcggcgacggcggggcagcgcaccggcaggcggattcattccacttaaaacctgaaaacattggaccacacaaagtcttactgatttcaggtaaaaacaataattgaagatgtccagcaaaacagcaagcaccaacaatatagcccaggcaaggagaactgtgcagcagttaagattagaagcctccattgaaagaataaaggtttcgaaggcatcagcggacctcatgtcctactgtgaggaacatgccaggagtgaccctttgctgataggaataccaacttcagaaaaccctttcaaggataaaaaaacttgcatcatcttatagtggaatagagaaacagctcctcgcctcttcccaacaacgcaaatttatgagcagctccttgaagaagatttaccttcagcttattttggtaaccactgctaataactaaaatgttctcagcttggaataatggactctgagtctctattttccaagttgtcctttctccttaaaataccctttt

SEQ ID NO: 34 - DNA, 2388 bp, Homo sapiens
gaaggacggagccgagccgcggctgcctccctcgctcactccctcgcgcactcgcccgccccctccctccctcccctcccttccccgggcccgggtctggccccggcccattcgctgttgggtcttctgctagggaggatgtcgggttcgtcgctgcccagcgccctggccctctcgctgttgctggtctctggctccctcctcccagggccaggcgccgctcagaacgctgggtttgtcaagtcgcccatgtcagaaactaagctcacgggggacgcctttgagctgtactgtgacgtggtcgggagccccacgccagagatccagtggtggtacgcagaagtcaaccgggcagagtctttcagacagctgtgggacggtgctcggaagcgccgtgtcaccgtaaacaccgcctacgggtcaaacggcgtgagtgtgctgagaataacccggctcaccttggaggactctgggacttacgagtgcagggccagcaacgaccccaagaggaatgacttgaggcaaaacccctccataacatggattcgagcccaggccaccataagcgtccttcagaagccaaggattgtcaccagtgaagaggtcattattcgagacagccctgttctccctgtcaccctgcagtgtaacctcacctccagctctcacacccttacatacagctactggacaaagaatggggtggaactgagtgccactcgtaagaatgccagcaacatggagtacaggatcaataagccgagagctgaggattcaggcgaataccactgcgtatatcactttgtcagcgctcctaaagcaaacgccaccattgaagtgaaagccgctcctgacatcactggccataaacggagtgagaacaagaatgaagggcaggatgccactatgtattgcaagtcagttggctacccccacccagactggatatggcgcaagaaggagaacgggatgcccatggacattgtcaatacctctggccgcttcttcatcatcaacaaggaaaattacactgagttgaacattgtgaacctgcagatcacggaagaccctggcgagtatgaatgtaatgccaccaacgccattggctccgcctctgttgtcactgtcctcagggtgcggagccacctggccccactctggcctttcttgggaattctggctgaaattatcatccttgtggtgatcattgttgtgtatgagaagaggaagaggccagatgaggttcctgacgatgatgaaccagctggaccaatgaaaaccaactctaccaacaatcacaaagataaaaacttgcgccagagaaacacaaattaagtactgcttacaatatctttaggttcctgaaactggtggcaacatgacctgctaaaattttctgcttggacctctttggttctctcccctttcaagtgagcaacaccacaatgactgtctaaagcatgccttatttagcctctcctgtaagggtgatctagccaggtacattttaaacaatgcttcagtgtagaaggtgtaaactattttgggcttgatgtgctgtgaatgttgcttttttttttcctttgttaaaatatttaaatagaagtgaaaaggtcctctgaggatcagatcatgcatgcgccattttttacttaatgcagctgttaaattggcaaagctctaaaatgcactgctgccatctagtgatacacttttgtaaagtacagcaaaacctacaggtatatacagcatataaatatatatatatatatatttatatttttgggggtgggagaaatccaaaataaagtaaatgcttgtttcatttttaagctgctgatattcattccttattgtatgttgtcagatgaggaaattgtgcagttctggtacataaagatgagtaatataaactgaaatctataattttaagggcttaacctgtgactttaataagctggaacagtccactgaatgggtataatgaattgcagtatatacgtatgattgctttttaagtgattatcttttcttctgttaagtcatgtaaattcataaatccttttgcactgatgtgttgaaccttattcttgtacattcattcaatcaaggcaaacttttataatttttcttttgtttccaatgaccttgaaatgttatagcatggtaatattctatgcaactatagttatactttttggtttgacactgtattttttcacattgatttactggttgatgatagattttataacctaacggttctcatgcggtgcgtaattgtagatgcatgtacttgtgtgttttgtgtaactattgaagtgcaatgatgtataaaaaagtggattcacctgtttttaaaaataaaacattgataaaaaaaaaaaa

SEQ ID NO: 35 - DNA, 1128 bp, Homo sapiens
ggcggcggccggagctcgagccccagcggctgagggcgggcgggcgggcgcgggggagggaggggggccggtccgcgacgactccccggacggcgtttctcctccgagcggcgccggtttcggcttggggggggcggggtacagcccatccatgaccatgggcgacaagaagagcccgaccaggccaaaaagacaagcgaaacctgccgcagacgaagggttttgggattgtagcgtctgcaccttcagaaacagtgctgaagcctttaaatgcagcatctgcgatgtgaggaaaggcacctccaccagaaaacctcggatcaattctcagctggtggcgcaacaagtggcacaacagtatgccaccccaccaccccctaaaaaggagaagaaggagaaagttgaaaagcaggacaaagagaaacctgagaaagacaaggaaattagtcctagtgttaccaagaaaaataccaacaagaaaaccaaaccaaagtctgacattctgaaagatcctcctagtgaagcaaacagcatacagtctgcaaatgctacaacaaagaccagcgaaacaaatcacacctcaaggccccggctgaaaaacgtggacaggagcactgcacagcagttggcagtaactgtgggcaacgtcaccgtcattatcacagactttaaggaaaagactcgctcctcatcgacatcctcatccacagtgacctccagtgcagggtcagaacagcagaaccagagcagctcggggtcagagagcacagacaagggctcctcccgttcctccacgccaaagggcgacatgtcagcagtcaatgatgaatctttctgaaattgcacatggaattgtgaaaactatgaatcagggtatgaaattcaaaacctccacctgcccatgctgcttgcatccctggagaatcttctgtggacatcgacctcttagtgatgctgccaggataatttctgcttgccatgggcatctggccaccaaggaatttcgcaccctgacgattactcttgacacttttatgtattccattgttttatatgattttcctaacaatcatttataattggatgtgctcctgaatctactttttataaaaaaaaaaaaaaaaaaaa

SEQ ID NO: 36 - DNA, 1547 bp, Homo sapiens
ggggacttcttgaacttgcagggagaataacttgcgcaccccactttgcgccggtgcctttgccccagcggagcctgcttcgccatctccgagccccaccgcccctccactcctcggccttgcccgacactgagacgctgttcccagcgtgaaaagagagactgcgcggccggcacccgggagaaggaggaggcaaagaaaaggaacggacattcggtccttgcgccaggtcctttgaccagagtttttccatgtggacgctctttcaatggacgtgtccccgcgtgcttcttagacggactgcggtctcctaaaggtcgaccatggtggccgggacccgctgtcttctagcgttgctgcttccccaggtcctcctgggcggcgcggctggcctcgttccggagctgggccgcaggaagttcgcggcggcgtcgtcgggccgcccctcatcccagccctctgacgaggtcctgagcgagttcgagttgcggctgctcagcatgttcggcctgaaacagagacccacccccagcagggacgccgtggtgcccccctacatgctagacctgtatcgcaggcactcaggtcagccgggctcacccgccccagaccaccggttggagagggcagccagccgagccaacactgtgcgcagcttccaccatgaagaatctttggaagaactaccagaaacgagtgggaaaacaacccggagattcttctttaatttaagttctatccccacggaggagtttatcacctcagcagagcttcaggttttccgagaacagatgcaagatgctttaggaaacaatagcagtttccatcaccgaattaatatttatgaaatcataaaacctgcaacagccaactcgaaattccccgtgaccagacttttggacaccaggttggtgaatcagaatgcaagcaggtgggaaagttttgatgtcacccccgctgtgatgcggtggactgcacagggacacgccaaccatggattcgtggtggaagtggcccacttggaggagaaacaaggtgtctccaagagacatgttaggataagcaggtctttgcaccaagatgaacacagctggtcacagataaggccattgctagtaacttttggccatgatggaaaagggcatcctctccacaaaagagaaaaacgtcaagccaaacacaaacagcggaaacgccttaagtccagctgtaagagacaccctttgtacgtggacttcagtgacgtggggtggaatgactggattgtggctcccccggggtatcacgccttttactgccacggagaatgcccttttcctctggctgatcatctgaactccactaatcatgccattgttcagacgttggtcaactctgttaactctaagattcctaaggcatgctgtgtcccgacagaactcagtgctatctcgatgctgtaccttgacgagaatgaaaaggttgtattaaagaactatcaggacatggttgtggagggttgtgggtgtcgctagtacagcaaaattaaatacataaatatatatata

SEQ ID NO: 37 - DNA, 1448 bp, Homo sapiens
tcgacgctgtagtggcttcgtcttcggtttttctcttccttcgctaacgcctcccggctctcgtcagcctcccgccggccgtctccttaacaccgaacaccatgccttcaattaagttgcagagttctgatggagagatatttgaagttgatgtggaaattgccaaacaatctgtgactattaagaccatgttggaagatttgggaatggatgatgaaggagatgatgacccagttcctctaccaaatgtgaatgcagcaatattaaaaaaggtcattcagtggtgcacccaccacaaggatgaccctcctcctcctgaagatgatgagaacaaagaaaagcgaacagatgatatccctgtttgggaccaagaattcctgaaagttgaccaaggaacactttttgaactcattctggctgcaaactacttagacatcaaaggtttgcttgatgttacatgcaagactgttgccaatatgatcaaggggaaaactcctgaggagattcgcaagaccttcaatatcaaaaatgactttactgaagaggaggaagcccaggtacgcaaagagaaccagtggtgtgaagagaagtgaaatgttgtgcctgacactgtaacactgtaaggattgttccaaatactagttgcactgctctgtttataattgttaatattagacaaacagtagacaaatgcagcagcaagtcaattgtattagcagaatattgtcctcattgcatgtgtagttgtagctcgagtcccaaaccttacggccaagtttcttctagtatgatggaaagtttcttttttctttgctctgaataaaactgaactgtgggttctctataagtggcattttgggctttcctcccttttttgtaaagcaatgtctgcctagtttattgtccaagttaactttaggtgaccttttaaaagttggcattgaaaataaaacaacttgcaaaaaagttttctggaatagaattaacaaaatattatctttatcatgagttggaaactggaaaaaggcttcttgaagtaaatgttctgagtggagctactaggatgtcttccagcctcctgcagtcaaggagtaccactgtattgattagcctgtatgtagcagggctcccttcattgcatctgaggacttgttttctttttctttatttttaatcctcttagttttaaatatattgcctagagactcagttactacccagtttgtggttttttgggagaaatgtaactggacagttagcttttcaattaaaaagacacttaacccatgtgggatgtcatctttttataattagtgttcccatgtggagaaaattattcacactacttgcatgtaaagaataatttaacttttaacattaaaatatgtggtaaaacccagaaagcatccatcatgaatgcaagatactttcaataaagtaagttatat

SEQ ID NO: 38 - DNA, 828 bp, Homo sapiens
gggggagtgaaagcgaaagcccgggcgactagccgggagaccagagatctagcgactgaagcagcatggccaagccgtgtggggtgcgcctgagcggggaagcccgcaaacaggtggaggtcttcaggcagaatcttttccaggaggctgaggaattcctctacagattcttgccacagaaaatcatatacctgaatcagctcttgcaagaggactccctcaatgtggctgacttgacttccctccgggccccactggacatccccatcccagaccctccacccaaggatgatgagatggaaacagataagcaggagaagaaagaagtccctaagtgtggatttctccctgggaatgagaaagtcctgtccctgcttgccctggttaagccagaagtctggactctcaaagagaaatgcattctggtgattacatggatccaacacctgatccccaagattgaagatggaaatgattttggggtagcaatccaggagaaggtgctggagagggtgaatgccgtcaagaccaaagtggaagctttccagacaaccatttccaagtacttctcagaacgtggggatgctgtggccaaggcctccaaggagactcatgtaatggattaccgggccttggtgcatgagcgagatgaggcagcctatggggagctcagggccatggtgctggacctgagggccttctatgctgagctttatcatatcatcagcagcaacctggagaaaattgtcaccccaaagggtgaagaaaagccatctatgtactgaacccgggactagaaggaaaataaatgatctatatgttgtgtgg

SEQ ID NO: 39 - DNA, 878 bp, Homo sapiens
gtcccgcgggtctgtctcttgcttcaacagtgtttggacggaacagatccggggactctcttccagcctccgaccgccctccgatttcctctccgcttgcaacctccgggaccatcttctcggccatctcctgcttctgggacctgccagcaccgtttttgtggttagctccttcttgccaaccaaccatgagctcccagattcgtcagaattattccaccgacgtggaggcagccgtcaacagcctggtcaatttgtacctgcaggcctcctacacctacctctctctgggcttctatttcgaccgcgatgatgtggctctggaaggcgtgagccacttcttccgcgaattggccgaggagaagcgcgagggctacgagcgtctcctgaagatgcaaaaccagcgtggcggccgcgctctcttccaggacatcaagaagccagctgaagatgagtggggtaaaaccccagacgccatgaaagctgccatggccctggagaaaaagctgaaccaggcccttttggatcttcatgccctgggttctgcccgcacggacccccatctctgtgacttcctggagactcacttcctagatgaggaagtgaagcttatcaagaagatgggtgaccacctgaccaacctccacaggctgggtggcccggaggctgggctgggcgagtatctcttcgaaaggctcactctcaagcacgactaagagccttctgagcccagcgacttctgaagggccccttgcaaagtaatagggcttctgcctaagcctctccctccagccaataggcagctttcttaactatcctaacaagccttggaccaaatggaaataaagctttttgatgcaaaaaaaaaaaaaaaaaaa

SEQ ID NO: 40 - DNA, 3745 bp, Homo sapiens
gtctagggactgaggagtcgccgccgccccgagtcccggtaccatgcatttcacagtggccttgtggagacaacgccttaacccaaggaagtgactcaaactgtgagaacttcaggttttccaacctattggtggtatgtctgacagtggatcacaacttggttcaatgggtagcctcaccatgaaatcacagcttcagatcactgtcatctcagcaaaacttaaggaaaataagaagaattggtttggaccaagtccttacgtagaggtcacagtagatggacagtcaaagaagacagaaaaatgcaacaacacaaacagtcccaagtggaagcaaccccttacagttatcgttacccctgtgagtaaattacattttcgtgtgtggagtcaccagacactgaaatctgatgttttgttgggaactgctgcattagatatttatgaaacattaaagtcaaacaatatgaaacttgaagaagtagttgtgactttgcagcttggaggtgacaaagagccaacagagacaataggagacttgtcaatttgtcttgatgggctacagttagagtctgaagttgttaccaatggtgaaactacatgttcagaaaatggggtttcgctctgtttgcccaggctggagtgcaatagtgcgatctcggctcactgcaacctctgcctcccgggtttaagtgattctcctatctcagcctcccgagtagctgggtttacaggtgcttctcagaatgatgatggctccagatccaaggatgaaacaagagtgagcacaaatggatcagatgaccctgaagatgcaggagctggtgaaaataggagagtcagtgggaataattctccatcactctcaaatggtggttttaaaccttctagacctccaagaccttcacgaccaccaccacccaccccacgtagaccagcatctgtcaatggttcaccatctgccacttctgaaagtgatgggtctagtacaggctctctgccgccgacaaatacaaatacaaatacatctgaaggagcaacatctggattaataattcctcttactatatctggaggctcaggccctaggccattaaatcctgtaactcaagctcccttgccacctggttgggagcagagagtggaccagcacgggcgagtttactatgtagatcatgttgagaaaagaacaacatgggatagaccagaacctctacctcctggctgggaacggcgggttgacaacatgggacgtatttattatgttgaccatttcacaagaacaacaacgtggcagaggccaacactggaatccgtccggaactatgaacaatggcagctacagcgtagtcagcttcaaggagcaatgcagcagtttaaccagagattcatttatgggaatcaagatttatttgctacatcacaaagtaaagaatttgatcctcttggtccattgccacctggatgggagaagagaacagacagcaatggcagagtatatttcgtcaaccacaacacacgaattacacaatgggaagaccccagaagtcaaggtcaattaaatgaaaagcccttacctgaaggttgggaaatgagattcacagtggatggaattccatattttgtggaccacaatagaagaactaccacctatatagatccccgcacaggaaaatctgccctagacaatggacctcagatagcctatgttcgggacttcaaagcaaaggttcagtatttccggttctggtgtcagcaactggccatgccacagcacataaagattacagtgacaagaaaaacattgtttgaggattcctttcaacagataatgagcttcagtccccaagatctgcgaagacgtttgtgggtgatttttccaggagaagaaggtttagattatggaggtgtagcaagagaatggttctttcttttgtcacatgaagtgttgaacccaatgtattgcctgtttgaatatgcagggaaggataactactgcttgcagataaaccccgcttcttacatcaatccagatcacctgaaatattttcgttttattggcagatttattgccatggctctgttccatgggaaattcatagacacgggtttttctttaccattctataagcgtatcttgaacaaaccagttggactcaaggatttagaatctattgatccagaattttacaattctctcatctgggttaaggaaaacaatattgaggaatgtgatttggaaatgtacttctccgttgacaaagaaattctaggtgaaattaagagtcatgatctgaaacctaatggtggcaatattcttgtaacagaagaaaataaagaggaatacatcagaatggtagctgagtggaggttgtctcgaggtgttgaagaacagacacaagctttctttgaaggctttaatgaaattcttccccagcaatatttgcaatactttgatgcaaaggaattagaggtccttttatgtggaatgcaagagattgatttgaatgactggcaaagacatgccatctaccgtcattatgcaaggaccagcaaacaaatcatgtggttttggcagtttgttaaagaaattgataatgagaagagaatgagacttctgcagtttgttactggaacctgccgattgccagtaggaggatttgctgatctcatggggagcaatggaccacagaaattctgcattgaaaaagttgggaaagaaaattggctacccagaagtcatacctgttttaatcgcctggacctgccaccatacaagagctatgagcaactgaaggaaaagctgttgtttgccatagaagaaacagaaggatttggacaagagtaacttctgagaacttgcaccatgaatgggcaagaacttatttgcaatgtttgtccttctctgcctgttgcacatcttgtaaaattggacaatggctctttagagagttatctgagtgtaagtaaattaatgttctcatttagatttatctcccagtgatttctactcagcgtttccagaaatcaggtctgcaaatgactagtcagaaccttgcttaacatgagattttaacacaacaatgaaatttgccttgtcttattccactagtttattcctttaacaacaatattttatgtgtgtcaaaagtctcacttgggagtagtgtttttttcttttagacattctgcagacatgcagggaagtcctttggtaactgcaatatacaagattttcctattaagcctcttggtaagaggcatttgttaaaagtgcaagcttactcctgcttctggggatgtgagcaaaattcgggcttgtgttctccctctcattttagtctgacttgactattgtttttcctttctggcgcatgaatccatacatcattcctggaagtgaggcaagactcttgcatctctacaaagtagttttgtcaatttgaattcagggaaaagttggtcacagcctgcaaatgacttcatttggaagtctgattgtttcagttgcctgacaaatactacactttacaaacaatgttaacactgtgattccttcattgttttaagaagttaacctagggccgggcatggtggctcatacctgtaatcctagcactctgggaggccgaggcaggaggatccctttagcccaggagttaaagaccagcctgggcaacatagggagaccctgtcttttttttgggcagcgtggtgggggataaataaaaaaaaaaaaaaaaaa

SEQ ID NO: 41 - DNA, 1812 bp, Homo sapiens
tagctaggcaggaagtcggcgcgggcggcgcggacagtatctgtgggtacccggagcacggagatctcgccggctttacgttcacctcggtgtctgcagcaccctccgcttcctctcctaggcgacgagacccagtggctagaagttcaccatgtctattctcaagatccatgccagggagatctttgactctcgcgggaatcccactgttgaggttgatctcttcacctcaaaaggtctcttcagagctgctgtgcccagtggtgcttcaactggtatctatgaggccctagagctccgggacaatgataagactcgctatatggggaagggtgtctcaaaggctgttgagcacatcaataaaactattgcgcctgccctggttagcaagaaactgaacgtcacagaacaagagaagattgacaaactgatgatcgagatggatggaacagaaaataaatctaagtttggtgcgaacgccattctgggggtgtcccttgccgtctgcaaagctggtgccgttgagaagggggtccccctgtaccgccacatcgctgacttggctggcaactctgaagtcatcctgccagtcccggcgttcaatgtcatcaatggcggttctcatgctggcaacaagctggccatgcaggagttcatgatcctcccagtcggtgcagcaaacttcagggaagccatgcgcattggagcagaggtttaccacaacctgaagaatgtcatcaaggagaaatatgggaaagatgccaccaatgtgggggatgaaggcgggtttgctcccaacatcctggagaataaagaaggcctggagctgctgaagactgctattgggaaagctggctacactgataaggtggtcatcggcatggacgtagcggcctccgagttcttcaggtctgggaagtatgacctggacttcaagtctcccgatgaccccagcaggtacatctcgcctgaccagctggctgacctgtacaagtccttcatcaaggactacccagtggtgtctatcgaagatccctttgaccaggatgactggggagcttggcagaagttcacagccagtgcaggaatccaggtagtgggggatgatctcacagtgaccaacccaaagaggatcgccaaggccgtgaacgagaagtcctgcaactgcctcctgctcaaagtcaaccagattggctccgtgaccgagtctcttcaggcgtgcaagctggcccaggccaatggttggggcgtcatggtgtctcatcgttcgggggagactgaagataccttcatcgctgacctggttgtggggctgtgcactgggcagatcaagactggtgccccttgccgatctgagcgcttggccaagtacaaccagctcctcagaattgaagaggagctgggcagcaaggctaagtttgccggcaggaacttcagaaaccccttggccaagtaagctgtgggcaggcaagcccttcggtcacctgttggctacacagacccctcccctcgtgtcagctcaggcagctcgaggcccccgaccaacacttgcaggggtccctgctagttagcgccccaccgccgtggagttcgtaccgcttccttagaacttctacagaagccaagctccctggagccctgttggcagctctagctttgcagtcgtgtaattggcccaagtcattgtttttctcgcctcactttccaccaagtgtctagagtcatgtgagcctcgtgtcatctccggggtggccacaggctagatccccggtggttttgtgctcaaaataaaaagcctcagtgacccatgag

SEQ ID NO: 42 - DNA, 2220 bp, Homo sapiens
ggaaaattacccggtatcgttagagctacaccaaaattgcattgagccaaacttgccaccaagagcccaacaatcaccatgatgctgagcacggaaggcagggaggggttcgtggtgaaggtcaggggcctaccctggtcctgctcagccgatgaagtgatgcgcttcttctctgattgcaagatccaaaatggcacatcaggtattcgtttcatctacaccagagaaggcagaccaagtggtgaagcatttgttgaacttgaatctgaagaggaagtgaaattggctttgaagaaggacagagaaaccatgggacacagatacgttgaagtattcaagtctaacagtgttgaaatggattgggtgttgaagcatacaggtccgaatagccctgatactgccaacgatggcttcgtccggcttagaggactcccatttggctgtagcaaggaagagattgttcagttcttttcagggttggaaattgtgccaaatgggatgacactgccagtggactttcaggggcgaagcacaggggaagcctttgtgcagtttgcttcacaggagatagctgagaaggccttaaagaaacacaaggaaagaatagggcacaggtacattgagatcttcaagagtagccgagctgaagttcgaacccactatgatccccctcgaaagctcatggctatgcagcggccaggtccctatgataggccgggggctggcagagggtataatagcattggcagaggagctgggtttgaaaggatgaggcgtggtgcctatggtggagggtatggaggctatgatgactatggtggctataatgatggatatggctttgggtctgatagatttggaagagacctcaattactgtttttcaggaatgtctgatcatagatacggagatggtgggtccagtttccagagcaccacagggcactgtgtacacatgagggggttaccttacagagccactgagaatgatatttataatttcttctcacctcttaatcccatgagagtacatattgaaattggacccgatggcagagttaccggtgaggcagatgttgaatttgctactcatgaagatgctgtggcagctatggcaaaagacaaagctaatatgcaacacagatatgtggagctcttcttaaattctactgcaggaacaagtgggggtgcttacgatcacagctatgtagaactttttttgaattctacagcaggggcaagtggtggcgcttatggtagccaaatgatgggagggatgggcttatccaaccagtctagttatggaggtcctgctagccagcagctgagtggtggttatggaggtggttatggtggtcagagcagtatgagtggatatgaccaagttctgcaggaaaactccagtgactatcagtcaaaccttgcttaggtagagaaggagcactaaatagctactccagatataaaagctgtacatttgtgggagttgaatagaatgggagggatgtttagtatatccagtatgattggtaaatgggaaatataattgattctgatcactcttggtcagcttctctttctttatctttctttctccttttttaagaaaacgagttaagtttaacagttttgcattacaggcttgtgattcatgcttactgtaaagtggaagttgagattattttaaaacttcaagctcagtaattttgaacactgaaacattcatctaggacataataacaaagttcagtattgaccataactgttaaaacaatttttagctttcctcaagttagttatgttgtaggagtgtacctaagcagtaagcgtatttaggttaatgcagtttcacttatgttaaatgttgctcttataccacaaatacattgaaaacttcggatgcatgttgagaaacatgcctttctgtaaaactcaaatataggagctgtgtctacgattcaaagtgaaaacatttggcatgtttgttaattctagctttttggtttaatatcctgtaaggcacgtgagtgtacactttttttttttttaaggatacgggacaattttaagatgtaataccaatactttagaagtttggtcgtgtcgtttgtatgaaaatctgaggctttggtttaaatctttccttgtattgtgatttccatttagatgtattgtactaagtgaaacttgttaaataaatcttccttttaaaaactggaaa

SEQ ID NO: 43 - DNA, 4076 bp, Homo sapiens
gcttatggcggcgctggagagggggcgctgagctgttgggtatgaagtgtaacagaacagactttaccacctgaaactgctgcttcaagttcagatcaggcaaggaacaaacctcgtaacaactaacaagaccaaagaagagtacacttaagttgaagacacaacacttgatctgaaacaagaagtttgtgcctactcaacagctttgaaagagcacttcccaacgctgctagtagtctttgttttcttcagtgctgtactgtgagattgcccggtacagcagcagttgtattctttattagcttggtagatcattttctctcgctcttttttttaatactagcaactttcatcctttgaaacgtgtgctgaaaaagaagaatcagcaaatactactgaaagtgcaatatttgagtatcactgcgagatgagctttgatccaaaccttctccacaacaatggacataatgggtaccctaatggtacttcagcagcactgcgtgaaactggggttattgaaaaactgttaacctcttacggatttattcagtgttcagaacgtcaagctagacttttcttccactgttcacagtataatggcaacctgcaagacttaaaagtaggagatgatgttgaatttgaagtatcatcggaccgacggactgggaaacccattgctgttaaactggtgaagataaaacaagaaatcctccctgaagaacgaatgaatggacaagttgtgtgcgctgttcctcacaacttagagagtaaatctccagctgccccgggtcagagtccaacagggagtgtatgctacgaacgtaatggggaagtgttttatctgacttacacccctgaagatgtcgaagggaacgttcagctggaaactggagataaaataaactttgtaattgataacaataaacatactggtgctgtaagtgctcgcaacattatgctgttgaaaaagaaacaagcccgctgtcagggagtagtttgtgccatgaaggaggcatttggctttattgaaagaggtgatgttgtaaaagagatattctttcactatagtgaatttaagggtgacttagaaaccttacagcctggcgatgatgtggaattcacaatcaaggacagaaatggtaaagaagttgcaacagatgtcagactattgcctcaaggaacagtcatttttgaagatatcagcattgaacattttgaaggaactgtaaccaaagttatcccaaaagtacccagtaaaaaccagaatgacccattgccaggacgcatcaaagttgactttgtgatccctaaagaacttccctttggagacaaagatacgaaatccaaggtgaccctgctggaaggtgaccatgttaggtttaatatttcaacagaccgacgtgacaaattagagcgagcaaccaatatagaagttctgtcaaatacatttcagttcactaatgaagcccgagaaatgggtgtgattgctgccatgagagatggttttggtttcatcaagtgtgtggatcgtgatgttcgtatgttcttccacttcagtgaaattctggatgggaaccagctccatattgcagatgaagtagagtttactgtggttcctgatatgctctctgctcaaagaaatcatgctattaggattaaaaaacttcccaagggcacggtttcatttcattcccattcagatcaccgttttctgggcacggtagaaaaagaagccactttttccaatcctaaaaccactagcccaaataaaggcaaagagaaggaggctgaggatggcattattgcttatgatgactgtggggtgaaactgactattgcttttcaagccaaggatgtggaaggatctacttctcctcaaataggagataaggttgaatttagtattagtgacaaacagaggcctggacagcaggttgcaacttgtgtgcgacttttaggtcgtaattctaactccaagaggctcttgggttatgtggcaactctgaaggataattttggatttattgaaacagccaatcatgataaggaaatctttttccattacagtgagttctctggtgatgttgatagcctggaactgggggacatggtcgagtatagcttgtccaaaggcaaaggcaacaaagtcagtgcagaaaaagtgaacaaaacacactcagtgaatggcattactgaggaagctgatcccaccatttactctggcaaagtaattcgccccctgaggagtgttgatccaacacagactgagtaccaaggaatgattgagattgtggaggagggcgatatgaaaggtgaggtctatccatttggcatcgttgggatggccaacaaaggggattgcctgcagaaaggggagagcgtcaagttccaattgtgtgtcctgggccaaaatgcacaaactatggcttacaacatcacacccctgcgcagggccacagtggaatgtgtgaaagatcagtttggcttcattaactatgaagtaggagatagcaagaagctctttttccatgtgaaagaagttcaggatggcattgagctacaggcaggagatgaggtggagttctcagtgattcttaatcagcgcactggcaagtgcagcgcctgtaatgtttggcgagtctgtgagggccccaaggctgttgcagctcctcgacctgatcggttggtcaatcgcttgaagaatatcactctggatgatgccagtgctcctcgcctaatggttcttcgtcagccaaggggaccagataactcaatggggtttggtgcagaaagaaagatccgtcaagctggtgtcattgactaaccacatccacaaagcacaccattaatccactatgatcaagttggggggaatctggtgaagggttctgaatatctccctcttcatccctcccgaaatctggaatacttattctattgagctattacaccagttttaacaccttcctcgtgttatgtttaaaaaaataaataaatttaagaaaaccattttaaataatgcacagttgcagcctggaaaaacttaaggtggcgccttatagtatcaattttaggagctttatttggtgcatttaacgcaactggtaattgcagaatccactttgcctgtgtaagtgaaaaatatagactgttatcttgttggccctatgaaattctgcacttttcattatatactctaccttcattaattacttctggcaagatgttctgccttagcactcagttgcattcttttcctttttcttcctgttcattatgctttaattctgaggaccatatgagggtagaatatattatcttttaaaaattacaaaaatttgtataggcaaaccatttcttaaagttgatggccaaattttaaaatgttatttttcatatcatttataatcttgtcacaatccacttaaagaagtttggttatatttcagtgaaaattttcttccagagtaggttttttttcgtgggttggggggtaactttactacaattagtaagtatggtgcagaatttcatgcaaatgaggagtgccagcagtgtgataatttaaacatatttaaacaaaaacaaaaaaaatgaatgcacaaacttgctgctgcttagatcactgcagcttctaggacccggtttcttttactgatttaaaaacaaaacaaaaaaaaataaaaaagttgtgcctgaaatgaatcttgtttttttttataagtagccgcctggttactgtgtcctgtaaaatacagacacttgacccttggtgtagcttctgttcaactttatatcacgggaatggatgggtctgatttcttggccctcttcttgaattggccatatacagggtccctggccagtggactgaaggctttgtctaagatgacaagggtcagctcaggggatgtgggggagggcggttttatcttcccccttgtcgtttgaggttttgatctctgggtaaagaggccgtttatctttgtaaacacgaaacatttttgctttctccagttttctgttaatggcgaaagaatggaagcgaataaagttttactgatttttgagacact

SEQ ID NO: 44 - DNA, 1542 bp, Homo sapiens
atgttcgccgaccgttgactattctctacaaaccacaaagacattggaacactatacctattattcggcgcatgagctggagtcctaggcacagctctaagcctccttattcgagccgagctgggccagccaggcaaccttctaggtaacgaccacatctacaacgttatcgtcacagcccatgcatttgtaataatcttcttcatagtaatacccatcataatcggaggctttggcaactgactagttcccctaataatcggtgcccccgatatggcgtttccccgcataaacaacataagcttctgactcttacctccctctctcctactcctgctcgcatctgctatagtggaggccggagcaggaacaggttgaacagtctaccctcccttagcagggaactactcccaccctggagcctccgtagacctaaccatcttctccttacacctagcaggtgtctcctctatcttaggggccatcaatttcatcacaacaattatcaatataaaaccccctgccataacccaataccaaacgcccctcttcgtctgatccgtcctaatcacagcagtcctacttctcctatctctcccagtcctagctgctggcatcactatactactaacagaccgcaacctcaacaccaccttcttcgaccccgccggaggaggagaccccattctataccaacacctattctgatttttcggtcaccctgaagtttatattcttatcctaccaggcttcggaataatctcccatattgtaacttactactccggaaaaaaagaaccatttggatacataggtatggtctgagctatgatatcaattggcttcctagggtttatcgtgtgagcacaccatatatttacagtaggaatagacgtagacacacgagcatatttcacctccgctaccataatcatcgctatccccaccggcgtcaaagtatttagctgactcgccacactccacggaagcaatatgaaatgatctgctgcagtgctctgagccctaggattcatctttcttttcaccgtaggtggcctgactggcattgtattagcaaactcatcactagacatcgtactacacgacacgtactacgttgtagcccacttccactatgtcctatcaataggagctgtatttgccatcataggaggcttcattcactgatttcccctattctcaggctacaccctagaccaaacctacgccaaaatccatttcactatcatattcatcggcgtaaatctaactttcttcccacaacactttctcggcctatccggaatgccccgacgttactcggactaccccgatgcatacaccacatgaaacatcctatcatctgtaggctcattcatttctctaacagcagtaatattaataattttcatgatttgagaagccttcgcttcgaagcgaaaagtcctaatagtagaagaaccctccataaacctggagtgactatatggatgccccccaccctaccacacattcgaagaacccgtatacataaaatctaga

SEQ ID NO: 45 - DNA, 2528 bp, Homo sapiens
gagttccagcagtccgcgagctgccgtcggctccgcggggggggcgggccgggcaccccggggcgcggaggagcgctcctcgcttctctccttcccccctgccgcactccgccggaccctcccgccggcccgcgccgctgcactcgccctctcctctcgccccccggcaaactttcggcccctccccgcccctcgcccgttattcgtcgtggctcaagcccggccacgccgccccaagggctcctcccgacctcccggcctgccgctccggccactgcgggatccagaaacatgtcgaccacacttctgtccgccttctacgatgtcgacttcttgtgcaagacagagaaatccctggccaacctcaacctgaacaacatgctggacaagaaggcggtggggacgcctgtggccgccgcccccagctcgggcttcgcgccgggattcctccgacggcactcggccagcaacctgcatgcactcgcccaccccgcgcccagccccggcagctgctcgcccaagttcccgggcgccgctaacggcagcagctgcggcagcgcggcggccggcggtccgacctcctacggcacccttaaggagccgtcggggggcggcggcacagccctgctcaacaaggagaacaaattccgggaccgctcgtttagcgagaacggcgatcgcagccagcacctcctgcacctgcagcagcagcagaaggggggcggcggctcccagatcaactccacgcgctacaagaccgagctgtgccggcccttcgaggagagcggcacgtgcaagtacggcgaaaagtgccagttcgcgcatggcttccacgagctgcgcagcctgactcgccatccgaagtacaagaccgagctgtgccgcacctttcataccatcggcttctgcccctatgggccgcgctgccacttcatccacaacgcggacgagcggcggcccgcgccgtcggggggcgcctccggggacctgcgtgcctttggcacgcgcgatgcgttgcacctgggcttcccgcgggagccgcggcccaagttgcaccacagcctcagcttctcgggcttcccgtcgggccaccatcagcccccgggcggcctcgagtcgccgctgctgctcgacagccccacgtcgcgcacgccgccgccgccctcctgctcttcggcctcgtcctgctcctcctccgcctcctcctgttcctcggcctccgcggcctccacgccctcgggcgccccgacatgctgcgcctccgcggcggccgcggctgcggccgctctgctgtacggcaccgggggcgccgaggacctgctggcgccgggggccccgtgcgcggcctgctcgtcggcctcgtgcgccaacaacgccttcgccttcggtccggagctcagcagcctcatcacgccgctcgccatccagacccacaactttgccgccgtggccgccgccgcctactaccgcagtcagcagcagcagcagcagcagggcctggcgccccccgcgcagccgccggcgccgcccagcgcgaccctccccgccggggccgccgcacctccctcgccgcccttcagcttccagctgccgcgccgcctgtccgactcgcccgtgttcgacgcgccccccagccccccggactcgctgtcggaccgcgacagctacctaagcggctccctgagctccggcagcctcagcggctctgagtctcccagcctcgaccctggccgccgcctgccaatcttcagccgcctctccatctccgacgactgaggcaagagggcgccagtgaggaggaagggaaggcggttcagagatgttggaggacacccctcgccatctcgcccttgctgggggcacgggagtggggggggtgacatgggccctaggcagactgcaagcccgaccgagcacttggactcgaactctgtgccgggaggggcccccacccctcctttttcggtttcctcttgtctttttttttttatttttattacgaagtttcattctttttgagcaaaaaagtcgaactttttctgttgaacaaaatattcacaacagggcagttgtgatacgaatagaacaaaaaaaaaaaaaaaacacttaaactttgttaggactccgatgagtttgggacttcaggaaaaatcaacccagcaccagcagctaccaaccaccattccatctcttcacttgaacagcattagttaagtccagatgtgggaacccttctcttggaagaagttcctaattgtgtctcagaccggtgtaaacaaaccagccagccgccaccttgctaaacctataagctttttaaaatccaatatattctgccaagaatatgccttgatagttagccctcagcccataggtgttttttgttttttaacagaattatatatgtctgggggtgaaaaaacccttgcattccaaaggtccatactggttacttggtttcattgccaccacttagtggatgttcagtttagaaccattttgtctgctccctctggaagccttgcgca

SEQ ID NO: 46 - DNA, 1526 bp, Homo sapiens
agtggtgctgggagtgtcgtggacgccgtgccgttactcgtagtcaggcggcggcgcaggcggcggcggcggcatagcgcacagcgcgccttagcagcagcagcagcagcagcagcatcggaggtacccccgccgtcgcagcccccgcgctggtgcagccaccctcgctccctctgctcttcctcccttcgctcgcaccatggctgatcagctgaccgaagaacagattgctgaattcaaggaagccttctccctatttgataaagatggcgatggcaccatcacaacaaaggaacttggaactgtcatgaggtcactgggtcagaacccaacagaagctgaattgcaggatatgatcaatgaagtggatgctgatggtaatggcaccattgacttccccgaatttttgactatgatggctagaaaaatgaaagatacagatagtgaagaagaaatccgtgaggcattccgagtctttgacaaggatggcaatggttatatcagtgcagcagaactacgtcacgtcatgacaaacttaggagaaaaactaacagatgaagaagtagatgaaatgatcagagaagcagatattgatggagacggacaagtcaactatgaagaattcgtacagatgatgactgcaaaatgaagacctactttcaactcctttttcccccctctagaagaatcaaattgaatcttttacttacctcttgcaaaaaaaagaaaaaagaaaaaagttcatttattcattctgtttctatatagcaaaactgaatgtcaaaagtaccttctgtccacacacacaaaatctgcatgtattggttggtggtcctgtcccctaaagatcaagctacacatcagttttacaatataaatacttgtactaccttaatgataaggactccttaaagttccatttgctaatgattaatacactgtttgggctggccagtttttcatgcatgcagcttgacgattgagcacagtcaggcctttgtattaaaaatgaaaaatgaaaaaacaaattcaaaacctattcaaatgggttctagttcaatttgtttagtataaattgtcatagctggtttactgaaaacaaacacatttaaaattggtttacctcaggatgacgtgcagaaaaatgggtgaaggataaaccgttgagacgtggccccactggtaggatggtcctcttgtacttcgtgtgctccgacccatggtgacgatgacacaccctggtggcatgcccgtgtatgttggtttagcgttgtctgcattgttctagagtgaaacaggtgtcaggctgtcactgttcacacaaatttttaataagaaacatttaccaagggagcatctttggactctctgtttttaaaaccttctgaaccatgacttggagccggcagagtaggctgtggctgtggacttcagcacaaccatcaacattgctgttcaaagaaattacagtttacgtccattccaagttgtaaatgctagtcttttttttttttttttccaataaa

SEQ ID NO: 47 - DNA, 5128 bp, Homo sapiens
actctggagtgggagtgggagcgagcgcttctgcgactccagttgtgagagccgcaagggcatgggaattgacgccactcaccgacccccagtctcaatctcaacgctgtgaggaaacctcgactttgccaggtccccaagggcagcggggctcggcgagcgaggcacccttctccgtccccatcccaatccaagcgctcctggcactgacgacgccaagagactcgagtgggagttaaagcttccagtgagggcagcaggtgtccaggccgggcctgcgggttcctgttgacgtcttgccctaggcaaaggtcccagttccttctcggagccggctgtcccgcgccactggaaaccgcacctccccgcagcatgggcaccagcctcagcccgaacgacccttggccgctaaacccgctgtccatccagcagaccacgctcctgctactcctgtcggtgctggccactgtgcatgtgggccagcggctgctgaggcaacggaggcggcagctccggtccgcgcccccgggcccgtttgcgtggccactgatcggaaacgcggcggcggtgggccaggcggctcacctctcgttcgctcgcctggcgcggcgctacggcgacgttttccagatccgcctgggcagctgccccatagtggtgctgaatggcgagcgcgccatccaccaggccctggtgcagcagggctcggccttcgccgaccggccggccttcgcctccttccgtgtggtgtccggcggccgcagcatggctttcggccactactcggagcactggaaggtgcagcggcgcgcagcccacagcatgatgcgcaacttcttcacgcgccagccgcgcagccgccaagtcctcgagggccacgtgctgagcgaggcgcgcgagctggtggcgctgctggtgcgcggcagcgcggacggcgccttcctcgacccgaggccgctgaccgtcgtggccgtggccaacgtcatgagtgccgtgtgtttcggctgccgctacagccacgacgaccccgagttccgtgagctgctcagccacaacgaagagttcgggcgcacggtgggcgcgggcagcctggtggacgtgatgccctggctgcagtacttccccaacccggtgcgcaccgttttccgcgaattcgagcagctcaaccgcaacttcagcaacttcatcctggacaagttcttgaggcactgcgaaagccttcggcccggggccgccccccgcgacatgatggacgcctttatcctctctgcggaaaagaaggcggccggggactcgcacggtggtggcgcgcggctggatttggagaacgtaccggccactatcactgacatcttcggcgccagccaggacaccctgtccaccgcgctgcagtggctgctcctcctcttcaccaggtatcctgatgtgcagactcgagtgcaggcagaattggatcaggtcgtggggagggaccgtctgccttgtatgggtgaccagcccaacctgccctatgtcctggccttcctttatgaagccatgcgcttctccagctttgtgcctgtcactattcctcatgccaccactgccaacacctctgtcttgggctaccacattcccaaggacactgtggtttttgtcaaccagtggtctgtgaatcatgacccagtgaagtggcctaacccggagaactttgatccagctcgattcttggacaaggatggcctcatcaacaaggacctgaccagcagagtgatgattttttcagtgggcaaaaggcggtgcattggcgaagaactttctaagatgcagctttttctcttcatctccatcctggctcaccagtgcgatttcagggccaacccaaatgagcctgcgaaaatgaatttcagttatggtctaaccattaaacccaagtcatttaaagtcaatgtcactctcagagagtccatggagctccttgatagtgctgtccaaaatttacaagccaaggaaacttgccaataagaagcaagaggcaagctgaaattttagaaatattcacatcttcggagatgaggagtaaaattcagtttttttccagttcctcttttgtgctgcttctcaattagcgtttaaggtgagcataaatcaactgtccatcaggtgaggtgtgctccatacccagcggttcttcatgagtagtgggctatgcaggagcttctgggagatttttttgagtcaaagacttaaagggcccaatgaattattatatacatactgcatcttggttatttctgaaggtagcattctttggagttaaaatgcacatatagacacatacacccaaacacttacaccaaactactgaatgaagaagtattttggtaaccaggccatttttggtgggaatccaagattggtctcccatatgcagaaatagacaaaaagtatattaaacaaagtttcagagtatattgttgaagagacagagacaagtaatttcagtgtaaagtgtgtgattgaaggtgataagggaaaagataaagaccagaaattcccttttcaccttttcaggaaaataacttagactctagtatttatgggtggatttatccttttgccttctggtatacttccttacttttaaggataaatcataaagtcagttgctcaaaaagaaatcaatagttgaattagtgagtatagtggggttccatgagttatcatgaattttaaagtatgcattattaaattgtaaaactccaaggtgatgttgtacctcttttgcttgccaaagtacagaatttgaattatcagcaaagaaaaaaaaaaaagccagccaagctttaaattatgtgaccataatgtactgatttcagtaagtctcataggttaaaaaaaaaagtcaccaaatagtgtgaaatatattacttaactgtccgtaagcagtatattagtattatcttgttcaggaaaaggttgaataatatatgccttgtgtaatattgaaaattgaaaagtacaactaacgcaaccaagtgtgctaaaaatgagcttgattaaatcaaccacctatttttgacatggaaatgaagcagggtttcttttcttcactcaaattttggcgaatctcaaaattagatcctaagatgtgttcttatttttataacatctttattgaaattctatttataatacagaatcttgttttgaaaataacctaattaatatattaaaattccaaattcatggcatgcttaaattttaactaaattttaaagccattctgattattgagttccagttgaagttagtggaaatctgaacattctcctgtggaaggcagagaaatctaagctgtgtctgcccaatgaataatggaaaatgccatgaattacctggatgttctttttacgaggtgacaagagttggggacagaactcccattacaactgaccaagtttctcttctagatgattttttgaaagttaacattaatgcctgctttttggaaagtcagaatcagaagatagtcttggaagctgtttggaaaagacagtggagatgaggtcagttgtgttttttaagatggcaattactttggtagctgggaaagcataaagctcaaatgaaatgtatgcattcacatttagaaaagtgaattgaagtttcaagttttaaagttcattgcaattaaacttccaaagaaagttctacagtgtcctaagtgctaagtgcttattacattttattaagctttttggaatctttgtaccaaaattttaaaaaagggagtttttgatagttgtgtgtatgtgtgtgtggggtggggggatggtaagagaaaagagagaaacactgaaaagaaggaaagatggttaaacattttcccactcattctgaattaattaatttggagcacaaaattcaaagcatggacatttagaagaaagatgtttggcgtagcagagttaaatctcaaataggctattaaaaaagtctacaacatagcagatctgttttgtggtttggaatattaaaaaacttcatgtaattttattttaaaatttcatagctgtacttcttgaatataaaaaatcatgccagtatttttaaaggcattagagtcaactacacaaagcaggcttgcccagtacatttaaattttttggcacttgccattccaaaatattatgccccaccaaggctgagacagtgaatttgggctgctgtagcctatttttttagattgagaaatgtgtagctgcaaaaataatcatgaaccaatctggatgcctcattatgtcaaccaggtccagatgtgctataatctgtttttacgtatgtaggcccagtcgtcatcagatgcttgcggcaaaagaaagctgtgtttatatggaagaaagtaaggtgcttggagtttacctggcttatttaatatgcttataacctagttaaagaaaggaaaagaaaacaaaaaacgaatgaaaataactgaatttggaggctggagtaatcagattactgctttaatcagaaaccctcattgtgtttctaccggagagagaatgtatttgctgacaaccattaaagtcagaagttttactccaggttattgcaataaagtataatgtttattaaatgcttcatttgtatgtcaaagctttgactctataagcaaattgcttttttccaaaacaaaaagatgtctcaggtttgttttgtgaattttctaaaagctttcatgtcccagaacttagcctttacctgtgaagtgttactacagccttaatattttcctagtagatctatattagatcaaatagttgcatagcagtatatgttaatttgtgtgtttttagctgtgacacaactgtgtgattaaaaggtatactttagtagacatttataactcaaggataccttcttatttaatcttttcttatttttgtactttatcatgaatgcttttagtgtgtgcataatagctacagtgcatagttgtagacaaagtacattctggggaaacaacatttatatgtagcctttactgtttgatataccaaattaaaaaaaaattgtatctcattacttatactgggacaccattaccaaaataataaaaatcactttcataatcttgaaaaaa

SEQ ID NO: 48 - DNA, 1186 bp, Homo sapiens
gatgtccggctggagctgtcgcctccgccgccgctgctgccggtgccggttgtgagcgggtctccagtcggctcctctgggcgtctcatggcctctagcagctccctggtgcccgaccggctgcgcctgccgctctgcttcctgggtgtctttgtctgctatttttactatgggatcctgcaggaaaagataacaagaggaaagtatggggaaggagccaagcaggagacgttcacctttgccttaactttggtcttcattcaatgtgtgatcaatgctgtgtttgccaagatcttgatccagttttttgacactgccagggtggatcgtacccggagctggctctatgctgcctgttctatctcctatctgggtgccatggtctccagcaattcagcactacagtttgtcaactacccaactcaggtccttggtaaatcctgcaagccaatcccagtcatgctccttggggtgaccctcttgaagaagaagtacccgttggccaagtacctgtgtgtgctgttaattgtggctggagtggcccttttcatgtacaaacccaagaaagttgttgggatagaagaacacacagtcggctatggagagctactcttgctattatcgctgaccctggatggactgactggtgtttcccaggaccacatgcgggctcattaccaaacaggctccaaccacatgatgctgaacatcaacctttggtcgacattgctgctgggaatgggaatcctgttcactggggagctctgggagttcttgagctttgctgaaaggtaccctgccatcatctataacatcctgctctttgggctgaccagtgccctgggtcagagcttcatctttatgacggttgtgtattttggtcccctgacctgctccatcatcactacaactcgaaagttcttcacaattttggcctctgtgatcctcttcgccaatcccatcagccccatgcagtgggtgggcactgtgcttgtgttcctgggtcttggtcttgatgccaagtttgggaaaggagctaagaagacatcccactaggaagagagagactacctccacatcaagaatatttaagttattatctcaaacagtgacatctcttgggaaaatggacttaataggaatatgggactgagttccagtcttttttaataaaataaaatcaagc

SEQ ID NO: 49 - DNA, 6282 bp, Homo sapiens
cacgaggcctcgtgccgcgtccatttgaacgtctcgcacgccttcctgccattagcactcgagcccgctgctgttgcccgttcttcctccggaatacgggagggagagggaatgataagctgctgcggcccaagagtcactgtgaaggaccccgccgctgccctcgggcctcctcggcccctgcgcctccggggagcagccggggctcgccgcgcctgacgcgtcccgagttatacagaaataatgttgatatttggaacccatgtcgaacttctatgaagaaaggacaacgatgattgcagcaagggatttgcaggaatttgttccttttggtcgagaccactgcaagcaccaccctaatgctttgaaccttcaacttcgccagctgcagccagcttctgaattatggtcttctgatggtgctgctggcttggtgggatcccttcaggaggttacaatccacgagaaacagaaggaaagctggcagttaaggaaaggagtaagtgaaattggagaagatgtggactatgatgaggaactctatgttgctggaaatatggtgatatggagcaaaggaagtaaaagccaggcattggcagtttataaagcatttacagttgacagtcctgttcagcaggcattgtggtgtgacttcattatatcacaggataagtctgaaaaggcctacagtagcaatgaagtagaaaaatgcatatgtatattgcaaagctcatgtattaacatgcatagcatagaaggaaaggattacatagcttcattaccatttcaggttgcaaatgtttggcccactaaatatggattgctgtttgaacgaagcgcttcttcacatgaagtacctccaggttcacccagagaacctttacctactatgttcagcatgctgcacccactagatgaaataactccacttgtttgtaaatctggaagtctttttggttcatcacgggtgcaatatgttgtagatcatgcaatgaaaattgttttcctcaatactgacccctctattgtaatgacttatgatgctgttcaaaatgtgcattctgtgtggactctccggagagtcaaatcagaggaagagaatgttgttttaaagttctctgaacaggggggaaccccacagaatgtggccactagcagctccctcacagcacatctcagaagcctctccaaaggagattcccctgtgacttcacctttccagaattactcctccattcacagccagagtcgctcaacctcatcacccagtctacattctcgctcaccttctatttccaacatggcagctctaagtcgtgctcattctcctgcgttaggagtgcactctttttcaggggtgcaaaggttcaacatttcaagccataatcagtctccaaagagacatagtatttctcattctccaaatagtaattctaatggctcctttcttgcaccagaaacggagccaattgttcctgaactgtgtattgaccatttgtggacagaaacgattactaatataagagagaaaaattcacaagcctcaaaagtgtttattacatctgacctatgtgggcaaaagttcctgtgctttttagtagagtcccagctccagttacgctgtgtaaagtttcaagagagtaatgataaaacccagctcatctttggttcagtgaccaacataccagcaaaggatgcagcaccagtggagaaaatagacaccatgctggtcttggaaggcagtggaaacctggtgctatacacaggagtggttcgggtgggaaaggtttttattcctggactgccagctccctctctgacgatgtccaacacaatgcctcggcccagtactccactagatggcgttagtactccaaagcctcttagtaaactccttggatcattggacgaggttgttctgttgtccccagttccagaactgagggattcttcaaaacttcatgattctctctataatgaggattgtactttccaacagcttggaacttacattcattctatcagagatcctgtccataacagagtcaccctggaactgagtaatggctccatggttaggatcactattcctgaaattgccacctctgagttagtacaaacgtgtttgcaagcaattaagtttatcctgccaaaagaaatagcagttcagatgcttgtcaagtggtacaatgtccacagtgctccaggaggacccagttatcactcagagtggaatttatttgtgacttgtctcatgaacatgatgggttataacacagaccgcttagcatggactagaaattttgactttgaaggatcactttctcctgtcattgcgcccaaaaaagcaaggccttccgagactggatctgatgatgactgggaatatttactaaattcagactaccaccagaatgttgagtctcatcttttgaacagatctttatgtctgagtccttcagaagcttcacagatgaaggatgaggatttttcacagaatctcagtctggattcttctacacttctctttactcacatacctgcaatttttttcgttcttcaccttgtgtatgaggagcttaagttgaatactctaatgggagaaggaatttgttcacttgttgaacttctcgttcagttggcaagggacttaaaattggggccttatgtagatcattactatagagactacccaacgcttgtcagaactactggacaagtgtgcacaattgatccaggtcaaacaggatttatgcatcatccatcattttttacgtctgagccaccaagtatttatcagtgggtgagttcttgtctgaagggtgaaggaatgccaccttatccttacctccctggaatctgtgaaagaagcagacttgtagtcttgagtattgcactgtacatacttggtgatgagagcttggtttctgatgaatcctcacagtatttaaccagaataactatagccccccagaagttgcaagtagaacaagaggaaaacaggtttagtttcaggcattctacatctgtttctagtctagctgaaagattggttgtctggatgactaatgtaggattcactttaagagatttggaaactcttccctttggaattgctcttcccatcagagatgcaatttatcactgtcgtgagcagcctgcctcagactggccagaagctgtctgtctcttgattggacgtcaggatctttccaagcaggcctgcgaaggaaacttacccaaagggaagtctgtgctctcatcagatgttccttcaggaacagaaactgaggaggaagatgacggcatgaatgacatgaatcacgaggtcatgtcattaatatggagtgaagatttaagggtgcaggatgtgcgaaggcttcttcagagtgcgcatcctgtccgtgtcaacgtagtgcagtacccagagctcagtgaccacgagttcatcgaggaaaaggaaaacagattgctccaattgtgtcagcgaactatggctcttcctgtaggacgaggaatgtttaccttgttttcgtaccatcctgttccaacagagccattgcctattcctaaattgaatctgactgggcgtgcccctcctcggaacacaacagtagaccttaatagtggaaacatcgatgtgcctcccaacatgacaagctgggccagctttcataatggtgtggctgctggcctgaagatagctcctgcctcccagatcgactcagcttggattgtttacaataagcccaagcatgctgagttggccaatgagtatgctggctttctcatggctctgggtttgaatgggcaccttaccaagctggcgactctcaatatccatgactacttgaccaagggccatgaaatgacaagcattggactgctacttggtgtttctgctgcaaaactaggcaccatggatatgtctattactcggcttcttagcattcacattcctgctctcttacccccaacgtccacagagctggatgttcctcacaatgtccaagtggctgcagtggttggcattggccttgtatatcaagggacagctcacagacatactgcagaagtcctgttggctgagataggacggcctcctggtcctgaaatggaatactgcactgacagagagtcatactccttagctgctggcttggccctgggcatggtctgcttggggcatggcagcaatttgataggtatgtctgatctcaatgtgcctgagcagctctatcagtacatggttggaggacataggcgctttcaaacaggaatgcatagggagaaacataaatcaccaagttatcaaatcaaagaaggagataccataaatgtggatgtgacttgtccaggtgctactctagctttggctatgatctacttaaaaaccaataacagatctattgcagattggctccgagcccctgacaccatgtatttgttggactttgtgaagccagaatttctcttgcttaggacacttgctcgatgcctgattttgtgggatgatattttaccaaattccaagtgggttgacagcaatgttcctcaaattataagagaaaatagtatctctctcagtgaaatcgaattgccgtgctcagaggatttgaatttggaaactttgtcccaagcacatgtctacataattgcaggagcctgcttgtctctgggttttcgatttgctggctcagaaaacttatcagcatttaactgtttgcataaatttgccaaagattttatgacttatttgtccgcacctaatgcttctgttacaggtcctcataacctagaaacttgtctgagcgtggtgctgctgtctctcgccatggtcatggctggctcaggaaacctaaaggttttgcagctttgtcgcttcttacacatgaaaacgggtggtgaaatgaactatggttttcacttagcccaccacatggcccttggacttctatttttgggaggaggaaggtactctttgagcacatcaaattcttccattgccgctcttctctgtgccctttatccgcacttcccagctcacagcactgacaaccggtatcatctccaggctctccggcacctctatgtgctggccgcggagcccaggcttctagtgcctgtggatgtggacacaaacacgccctgctatgccctcttagaagttacctacaagggcactcagtggtatgaacaaaccaaagaagaattgatggctcctacccttcttccagaactccatcttttaaagcagattaaagtaaaaggcccaagatactgggaactgctcatagatttaagcaaaggaacacaacacttgaagtccatcctttccaaggatggggttttatatgttaaactccgggcgggtcagctctcctacaaagaagatccaatgggatggcaaagtttgttggctcagactgttgctaacaggaactctgaagcccgggctttcaagccagaaacaatctcagcattcacttctgatccagcacttctgtcatttgctgaatatttctgcaagccaactgtgaacatgggtcagaaacaggaaattctggatctcttttcttcagtactctatgaatgtgttacccaggagaccccagagatgttgcctgcatacatagcaatggatcaggctataagaagacttgggagaagagaaatgtctgagacttctgaactttggcagataaagttggtgttagagtttttcagctcccgaagccatcaggagcggctgcagaaccaccctaagcgggggctctttatgaactcggaattcctccctgttgtgaagtgcaccattgataataccctggaccagtggctacaagtcgggggtgatatgtgtgtgcacgcctacctcagcgggcagcccttggaggaatcacagctgagcatgctggcctgcttcctcgtctaccactctgtgccagctccacagcacctgccacctataggactagaagggagcacaagctttgctgaactgctcttcaaatttaagcagctaaaaatgccagtgcgagctttgctgagattggctcctttgcttcttggaaatccacagccaatggtgatgtgaccgtgtctggcggtgaacctaccctgaaacgtgacttctgcacaacaaacgtgaccaaacatcaaagctaaagcaatgtttataaagttttatggtataactagggggaaatgagctgcacaaacctcaatgtattttaaatctgttgctgtcatcattaacggtatatgacatataaaagcaag

SEQ ID NO: 50 - DNA, 1993 bp, Homo sapiens
ctagttaaggcggcacagggccgaggcgtagtgtgggtgactcctccgttccttgggtcccgtcgtctgtgatactgcagttcagccatggcagaaccgcagcccccgtccggcggcctcacggacgaggccgccctcagttgctgctccgacgcggaccccagtaccaaggattttctattgcagcagaccatgctacgagtgaaggatcctaagaagtcactggatttttatactagagttcttggaatgacgctaatccaaaaatgtgattttcccattatgaagttttcactctacttcttggcttatgaggataaaaatgacatccctaaagaaaaagatgaaaaaatagcctgggcgctctccagaaaagctacacttgagctgacacacaattggggcactgaagatgatgcgacccagagttaccacaatggcaattcagaccctcgaggattcggtcatattggaattgctgttcctgatgtatacagtgcttgtaaaaggtttgaagaactgggagtcaaatttgtgaagaaacctgatgatggtaaaatgaaaggcctggcatttattcaagatcctgatggctactggattgaaattttgaatcctaacaaaatggcaaccttaatgtagtgctgtgagaattctcctttgagatttcagaagaaaggaaacaatgtgattcaagatatttacataccagaagcatctaggactgatggatcactgtcccgattcaaattattcttcagtccatttccccttcctatttcagctgttccttttcacctaactgttcagtcattctggttttcaagcagtgctttatctcatgtccttgaatatagttgtgtaactttattttttaggtaataattagaacagttcccttcagaggctgcatttgccttcttctgccacctaaatattacttcccttcaaatctgcctttgaatcatcatttttaaaaaaaaattaacatgtttttgttgtagttatcttctggggtttcaattcctcagaaacaacttttttcacaacggaaaggaaagaacactagtgttctttcagtaaagtacaaagtgtttattttacaaaagagtaggtactcttgagagcaattcaaatcatgctgacaaggatactgatagaaaaagtgatttcttcttattataaagtacatttaaagttcaaggactaaccttatttatttgggaaaggggaggaggaaggaaatgatatggtacccagacactgggctaggctgcaactttatctcatttaatactcccagctgtcatgtgagaaagaaagcaggctaggcatgtgaaatcactttcatggattattaatggatttaagagggcatcaatcagctcaactcaagatttcataatcatttttagtatttagattgtgcctcaaagttgtagtacctcacaatacctccactggtttcctgttgtaaaaaccttcagtgagtttgaccattgtgctcttggctcttgggctggagtaccgtggtgagggagtaaacactagaagtctttagtacaaaactgctctagggacacctggtgattcctacacaagtgatgtttatatttctcataaagagtcttccctatcccaaggtcttcatgatgccagtagccatatatgataaattatgttcagtgataacttagttatcagaaatcagctcagtggtcttccccgccatgattcacatttgatgagtttttaaaaatcaaagtgattttgaaaatctctaatggctcagaaaataaaaacatccagtttgtggatgactatatttagatttctctagactctagtggaagacctttggaaaggccatgccaaccgtgcttgtactgctagaagcactttatgtttcctttttgggtgaaatggatttatgtgagtgctttaaacaaatagcaatacttatagactgaaataaaatgaaacttcaaataag

SEQ ID NO: 51 - DNA, 2018 bp, Homo sapiens
cctttccgtctggcggcagccatcaggtaagccaagatgggtgcatacaagtacatccaggagctatggagaaagaagcagtctgatgtcatgcgctttcttctgagggtccgctgctggcagtaccgccagctctctgctctccacagggctccccgccccacccggcctgataaagcgcgccgactgggctacaaggccaagcaaggttacgttatatataggattcgtgttcgccgtggtggccgaaaacgcccagttcctaagggtgcaacttacggcaagcctgtccatcatggtgttaaccagctaaagtttgctcgaagccttcagtccgttgcagaggagcgagctggacgccactgtggggctctgagagtcctgaattcttactgggttggtgaagattccacatacaaattttttgaggttatcctcattgatccattccataaagctatcagaagaaatcctgacacccagtggatcaccaaaccagtccacaagcacagggagatgcgtgggctgacatctgcaggccgaaagagccgtggccttggaaagggccacaagttccaccacactattggtggctctcgccgggcagcttggagaaggcgcaatactctccagctccaccgttaccgctaatataagtaaagtttgtaaaattcatacttaataaacaatttaggacagtcatgtctgcttacaggtgttatttgtctgttaaaactagtctgcagatgtttcttgaatgctttgtcaaattaagaaagttaaagtgcaataatgtttgaagacaataagtggtggtgtatcttgtttctaataagataaacttttttgtctttgctttatcttattagggagttgtatgtcagtgtataaaacatactgtgtggtataacaggcttaataaattctttaaaaggagagaactgaaactagccctgtagatttgtctggtgcatgtgatgaaacctgcagctttatcggagtgatggcaatgctctgctggtttattttcaagtggctgcgttttttttagtttggcaggtgtagactttttaagttgggctttagaaaatctgggttagcctgaagaaaattgcctcagcctccacagtaccattttaaattcacataaaaggtgaaagctcctggttcagtgccatggcttcatggcattcagtgattagtggtaatggtaaacactggtgtgttttgaagttgaatgtgcgataaaattattagccttaagattggtaagctagcaatgaatgctagggtgggaagctggtgagccagtggccattagataaatacctttcaagtgtgagcttagacgtcaaccctaaaatacttaaccgtaatgctaattgtgatcattatgaatcccttcagtcacattagggggaaagtagttggctataagtacgtcattcttagtccagtcagtcttaaaaacatcttgggttacccactctgtccactcccataggctacagaaaaagtcacaagcgcatggtttccaaccatatgtgttttctgcagttatttctcttgttctggccaaacaaccctaaaaatccttaccattccacaaagttggaccatcacttgtgcacccactttgactatgagtataccaccacattgcatttctgtttgcaccatgtcttccaggagactagactactgttgtccagggtcaatttgagtgtaaagaaaatgtagacaaggaattgcccaattttaaattctgactttgctgacttaatttaaatgctcgttctgaaccaattttctcctatcttctctaggggtttcaaaagactcagttaattgatttccaggaagtactcatagcaagttcataaaagttcttgagacctaaatttcttcacaaaaaaagaaaagatcttaagtcatacattttaattgtgtagaggttgttcaactgaaggaataaatgtctattaaactaaaaaaaaaaaaaaaaaaaaaaaaaaaaa

SEQ ID NO: 52 - DNA, 4259 bp, Homo sapiens
atggcgaagatcgccaagactcacgaagatattgaagcacagattcgagaaattcaaggcaagaaggcagctcttgatgaagctcaaggagtgggcctcgattctacaggttattatgaccaggaaatttatggtggaagtgacagcagatttgctggatacgtgacatcaattgctgcaactgaacttgaagatgatgacgatgactattcatcatctacgagtttgcttggtcagaagaagccaggatatcatgcccctgtggcattgcttaatgatataccacagtcaacagaacagtatgatccatttgctgagcacagacctccaaagattgcagaccgggaagatgaatacaaaaagcataggcggaccatgataatttccccagagcgtcttgatccttttgcagatggagggaagacccctgatcctaaaatgaatgttaggacttacatggatgtaatgcgagaacaacacttgactaaagaagaacgagaaattaggcaacagctagcagaaaaagctaaagctggagaactaaaagtcgtcaatggagcagcagcgtcccagcctccatcaaaacgaaaacggcgttgggatcaaacagctgatcagactcctggtgccactcccaaaaaactatcaagttgggatcaggcagagacccctgggcatactccttccttaagatgggatgagacaccaggtcgtgcaaagggaagcgagactcctggagcaaccccaggctcaaaaatatgggatcctacacctagccacacaccagcgggagctgctactcctggacgaggtgatacaccaggccatgcgacaccaggccatggaggcgcaacttccagtgctcgtaaaaacagatgggatgaaacccccaaaacagagagagatactcctgggcatggaagtggatgggctgagactcctcgaacagatcgaggtggagattctattggtgaaacaccgactcctggagccagtaaaagaaaatcacggtgggatgaaacaccagctagtcagatgggtggaagcactccagttctgacccctggaaagacaccaattggcacaccagccatgaacatggctacccctactccaggtcacataatgagtatgactcctgaacagcttcaggcttggcggtgggaaagagaaattgatgagagaaatcgcccactttctgatgaggaattagatgctatgttcccagaaggatataaggtacttcctcctccagctggttatgttcctattcgaactccagctcgaaagctgacagctactccaacacctttgggtggtatgactggtttccacatgcaaactgaagatcgaactatgaaaagtgttaatgaccagccatctggaaatcttccatttttaaaacctgatgatattcaatactttgataaactattggttgatgttgatgaatcaacacttagtccagaagagcaaaaagagagaaaaataatgaagttgcttttaaaaattaagaatggaacaccaccaatgagaaaggctgcattgcgtcagattactgataaagctcgtgaatttggagctggtcctttgtttaatcagattcttcctctgctgatgtctcctacacttgaggatcaagagcgtcatttacttgtgaaagttattgataggatactgtacaaacttgatgacttagttcgtccatatgtgcataagatcctcgtggtcattgaaccgctattgattgatgaagattactatgctagagtggaaggcctagagatcatttctaatttggcaaaggctgctggtctggctactatgatctctaccatgagacctgatatagataacatggatgagtatgtccgtaacacaacagctagagcttttgctgttgtagcctctgccctgggcattccttctttattgcccttcttaaaagctgtgtgcaaaagcaagaagtcctggcaagcgagacacactggtattaagattgtacaacagatagctattcttatgggctgtgccatcttgccacatcttagaagtttagttgaaatcattgaacatggtcttgtggatgagcagcagaaagttcggaccatcagtgctttggccattgctgccttggctgaagcagcaactccttatggtatcgaatcttttgattctgtgttaaagcctttatggaagggtatccgccaacacagaggaaagggtttggctgctttcttgaaggctattgggtatcttattcctcttatggatgcagaatatgccaactactatactagagaagtgatgttaatccttattcgagaattccagtctcctgatgaggaaatgaaaaaaattgtgctgaaggtggtaaaacagtgttgtgggacagatggtgtagaagcaaactacattaaaacagagattcttcctcccttttttaaacacttctggcagcacaggatggctttggatagaagaaattaccgacagttagttgatactactgtggagttggcaaacaaagtaggtgcagcagaaattatatccaggattgtggatgatctgaaagatgaagccgaacagtacagaaaaatggtgatggagacaattgagaaaattatgggcaatttgggagcagcagatattgatcataaacttgaagaacaactgattgatggtattctttatgctttccaagaacagactacagaggactcagtaatgttgaacggctttggcacagtggttaatgctcttggcaaacgagtcaaaccatacttgcctcagatctgtggtacagttttgtggcgtttaaataacaaatctgctaaagttaggcaacaggcagctgacttgatttctcgaactgctgttgtcatgaagacttgtcaagaggaaaaattgatgggacacttgggtgttgtattgtatgagtatttgggtgaagagtaccctgaagtattgggcagcattcttggagcactgaaggccattgtaaatgtcataggtatgcataagatgactccaccaattaaagatctgctgcctagactcacccccatcttaaagaacagacatgaaaaagtacaagagaattgtattgatcttgttggtcgtattgctgacaggggagctgaatatgtatctgcaagagagtggatgaggatttgctttgagcttttagagctcttaaaagcccacaaaaaggctattcgtagagccacagtcaacacatttggttatattgcaaaggccattggccctcatgatgtattggctacacttctgaacaacctcaaagttcaagaaaggcagaacagagtttgtaccactgtagcaatagctattgttgcagaaacatgttcaccctttacagtactccctgccttaatgaatgaatacagagttcctgaactgaatgttcaaaatggagtgttaaaatcgctttccttcttgtttgaatatattggtgaaatgggaaaagactacatttatgccgtaacaccgttacttgaagatgctttaatggatagagaccttgtacacagacagacggctagtgcagtggtacagcacatgtcacttggggtttatggatttggttgtgaagattcgctgaatcacttgttgaactatgtatggcccaatgtatttgagacatctcctcatgtaattcaggcagttatgggagccctagagggcctgagagttgctattggaccatgtagaatgttgcaatattgtttacagggtctgtttcacccagcccggaaagtcagagatgtatattggaaaatttacaactccatctacattggttcccaggacgctctcatagcacattacccaagaatctacaacgatgataagaacacctatattcgttatgaacttgactatatcttataattttattgtttattttgtgtttaatgcacagctacttcacaccttaaacttgctttgatttggtgatgtaaacttttaaacattgcagttcagtgtagaactggtcatagaggaagagctagaaatccagtagcatgatttttaaataacctgtctttgtttttgatgttaaacagtaaatgccagtagtgaccaagaacacagtgattatatacactatactggagggatttcatttttaattcatctttatgaagatttagaactcattccttgtgtttaaagggaatgtttaattgagaaataaacatttgtgtacaaaatgctaaaaaaaaaaaaaaaaa

SEQ ID NO: 53 - DNA, 6609 bp, Homo sapiens
ttcttttaaggagtttgccgcgagcgcgtctccttcattcgcaggctgggcgcgttcgcagtcggctggcggcgaaggaaggcgctctcgggacctcgcgggcgcgcgtcttttggctcttgcccctgtccctgcggcttggggaaggcgtaacccggcggctaggcgcgggagaagtgcggaggagccatgggcgccgggagctccaccgagcagcgcagcccggagcagccgcccgaggggagctccacgccggctgagcccgagcccagcggcggcggcccctcggccgaggcggcgccagacaccaccgcggaccccgccatcgctgcctcggaccccgccaccaagctcctacagaagaatggtcagctgtccaccatcaatggcgtagctgagcaagatgagctcagcctccaggagggtgacctaaatggccagaaaggagccctgaacggtcaaggagccctaaacagccaggaggaagaagaagtcattgtcacagaggttggacagagagactctgaagatgtgagcaaaagagactccgataaagagatggctactaagtcagcggttgttcacgacatcacagatgatgggcaggaggagacacccgaaataatcgaacagattccttcttcagaaagcaatttagaagagctaacacaacccactgagtcccaggctaatgatattggatttaagaaggtgtttaagtttgttggctttaaattcactgtgaaaaaggataagacagagaagcctgacactgtccagctactcactgtgaagaaagatgaaggggagggagcagcaggggctggcgaccacaaggaccccagccttggggctggagaagcagcatccaaagaaagcgaacccaaacaatctacagagaaacccgaagagaccctgaagcgtgagcaaagccacgcagaaatttctcccccagccgaatctggccaagcagtggaggaatgcaaagaggaaggagaagagaaacaagaaaaagaacctagcaagtctgcagaatctccgactagtcccgtgaccagtgaaacaggatcaaccttcaaaaaattcttcactcaaggttgggccggctggcgcaaaaagaccagtttcaggaagccgaaggaggatgaagtggaagcttcagagaagaaaaaggaacaagagccagaaaaagtagacacagaagaagacggaaaggcagaggttgcctccgagaaactgaccgcctccgagcaagcccacccacaggagccggcagaaagtgcccacgagccccggttatcagctgaatatgagaaagttgagctgccctcagaggagcaagtcagtggctcgcagggaccttctgaagagaaacctgctccgttggcgacagaagtgtttgatgagaaaatagaagtccaccaagaagaggttgtggccgaagtccacgtcagcaccgtggaggagagaaccgaagagcagaaaacggaggtggaagaaacagcagggtctgtgccagctgaagaattggttgaaatggatgcagaacctcaggaagctgaacctgccaaggagctggtgaagctcaaagaaacgtgtgtttccggagaggaccctacacagggagctgacctcagtcctgatgagaaggtgctgtccaaaccccccgaaggcgttgtgagtgaggtggaaatgctgtcatcacaggagagaatgaaggtgcagggaagtccactaaagaagctttttaccagcactggcttaaaaaagctttctggaaagaaacagaaagggaaaagaggaggaggagacgaggaatcaggggagcacactcaggttccagccgattctccggacagccaggaggagcaaaagggcgagagctctgcctcatcccctgaggagcccgaggagatcacgtgtctggaaaagggcttagccgaggtgcagcaggatggggaagctgaagaaggagctacttccgatggagagaaaaaaagagaaggtgtcactccctgggcatcattcaaaaagatggtgacgcccaagaagcgtgttagacggccttcggaaagtgataaagaagatgagctggacaaggtcaagagcgctaccttgtcttccaccgagagcacagcctctgaaatgcaagaagaaatgaaagggagcgtggaagagccaaagccggaagaaccaaagcgcaaggtggatacctcagtatcttgggaagctttaatttgtgtgggatcatccaagaaaagagcaaggagagggtcctcttctgatgaggaagggggaccaaaagcaatgggaggagaccaccagaaagctgatgaggccggaaaagacaaagagacggggacagacgggatccttgctggttcccaagaacatgatccagggcagggaagttcctccccggagcaagctggaagccctaccgaaggggagggcgtttccacctgggagtcatttaaaaggttagtcacgccaagaaaaaaatcaaagtccaagctggaagagaaaagcgaagactccatagctgggtctggtgtagaacattccactccagacactgaacccggtaaagaagaatcctgggtctcaatcaagaagtttattcctggacgaaggaagaaaaggccagatgggaaacaagaacaagcccctgttgaagacgcagggccaacaggggccaacgaagatgactctgatgtcccggccgtggtccctctgtctgagtatgatgctgtagaaagggagaaaatggaggcacagcaagcccaaaaaagcgcagagcagcccgagcagaaggcagccactgaggtgtccaaggagctcagcgagagtcaggttcatatgatggcagcagctgtcgctgacgggacgagggcagctaccattattgaagaaaggtctccttcttggatatctgcttcagtgacagaacctcttgaacaagtagaagctgaagccgcactgttaactgaggaggtattggaaagagaagtaattgcagaagaagaaccccccacggttactgaacctctgccagagaacagagaggcccggggcgacacggtcgttagtgaggcggaattgacccccgaagctgtgacagctgcagaaactgcagggccattgggtgccgaagaaggaaccgaagcatctgctgctgaagagaccacagaaatggtgtcagcagtctcccagttaaccgactccccagacaccacagaggaggccactccggtgcaggaggtggaaggtggcgtacctgacatagaagagcaagagaggcggactcaagaggtcctccaggcagtggcagaaaaagtgaaagaggaatcccagctgcctggcaccggtgggccagaagatgtgcttcagcctgtgcagagagcagaggcagaaagaccagaagagcaggctgaagcgtcgggtctgaagaaagagacggatgtagtgttgaaagtagatgctcaggaggcaaaaactgagccttttacacaagggaaggtggtggggcagaccaccccagaaagctttgaaaaagctcctcaagtcacagagagcatagagtccagtgagcttgtaaccacttgtcaagccgaaaccttagctggggtaaaatcacaggagatggtgatggaacaggctatcccccctgactcggtggaaacccctacagacagtgagactgatggaagcacccccgtagccgactttgacgcaccaggcacaacccagaaagacgagattgtggaaatccatgaggagaatgaggtcgcatctggtacccagtcagggggcacagaagcagaggcagttcctgcacagaaagagaggcctccagcaccttccagttttgtgttccaggaagaaactaaagaacaatcaaagatggaagacactctagagcatacagataaagaggtgtcagtggaaactgtatccattctgtcaaagactgaggggactcaagaggctgaccagtatgctgatgagaaaaccaaagacgtaccatttttcgaaggacttgaggggtctatagacacaggcataacagtcagtcgggaaaaggtcactgaagttgcccttaaaggtgaagggacagaagaagctgaatgtaaaaaggatgatgctcttgaactgcagagtcacgctaagtctcctccatcccccgtggagagagagatggtagttcaagtcgaaagggagaaaacagaagcagagccaacccatgtgaatgaagagaagcttgagcacgaaacagctgttaccgtatctgaagaggtcagtaagcagctcctccagacagtgaatgtgcccatcatagatggggcaaaggaagtcagcagtttggaaggaagccctcctccctgcctaggtcaagaggaggcagtatgcaccaaaattcaagttcagagctctgaggcatcattcactctaacagcggctgcagaggaggaaaaggtcttaggagaaactgccaacattttagaaacaggtgaaacgttggagcctgcaggtgcacatttagttctggaagagaaatcctctgaaaaaaatgaagactttgccgctcatccaggggaagatgctgtgcccacagggcccgactgtcaggcaaaatcgacaccagtgatagtatctgctactaccaagaaaggcttaagttccgacctggaaggagagaaaaccacatcactgaagtggaagtcagatgaagtcgatgagcaggttgcttgccaggaggtcaaagtgagtgtagcaattgaggatttagagcctgaaaatgggattttggaacttgagaccaaaagcagtaaacttgtccaaaacatcatccagacagccgttgaccagtttgtacgtacagaagaaacagccaccgaaatgttgacgtctgagttacagacacaagctcacgtgataaaagctgacagccaggacgctggacaggaaacggagaaagaaggagaggaacctcaggcctctgcacaggatgaaacaccaattacttcagccaaagaggagtcagagtcaaccgcagtgggacaagcacattctgatatttccaaagacatgagtgaagcctcagaaaagaccatgactgttgaggtagaaggttccactgtaaatgatcagcagctggaagaggtcgtcctcccatctgaggaagagggaggtggagctggaacaaagtctgtgccagaagatgatggtcatgccttgttagcagaaagaatagagaagtcactagttgaaccgaaagaagatgaaaaaggtgatgatgttgatgaccctgaaaaccagaactcagccctggctgatactgatgcctcaggaggcttaaccaaagagtccccagatacaaatggaccaaaacaaaaagagaaggaggatgcccaggaagtagaattgcaggaaggaaaagtgcacagtgaatcagataaagcgatcacaccccaagcacaggaggagttacagaaacaagagagagaatctgcaaagtcagaacttacagaatcttaaaacatcatgcagttaaactcattgtctgtttggaagaccagaatgtgaagacaagtagtagaagaaaatgaatgctgctgctgagactgaagaccagtatttcagaactttgagaattggagagcaggcacatcaactgatctcatttctagagagcccctgacaatcctgaggcttcatcaggagctagagccatttaacatttcctctttccaagaccaacctacaattttcccttgataaccatataaattctgatttaaggtcctaaattcttaacctggaactggagttggcaatacctagttctgcttctgaaactggagtatcattctttacatatttatatgtatgttttaagtagtcctcctgtatctattgtatatttttttcttaatgtttaaggaaatgtgcaggatactacatgctttttgtatcacacagtatatgatggggcatgtgccatagtgcaggcttggggagctttaagcctcagttatataacccacgaaaaacagagcctcctagatgtaacattcctgatcaaggtacaattctttaaaattcactaatgattgaggtccatatttagtggtactctgaaattggtcactttcctattacacggagtgtgctaaaactaaaaagcattttgaaacatacagaatgttctattgtcattgggaaatttttctttctaacccagtggaggttagaaagaagttatattctggtagcaaattaactttacatcctttttcctacttgttatggttgtttggaccgataagtgtgcttaatcctgaggcaaagtagtgaatatgttttatatgttatgaagaaaagaattgttgtaagtttttgattctactcttatatgctggactgcattcacacatggcatgaaataagtcaggttctttacaaatggtattttgatagatactggattgtgtttgtgccatatttgtgccattcttttaagaacaatgttgcaacacattcatttggataagttgtgatttgacgactgatttaaataaaatatttgcttcacttaaaaaaaaaaaa

SEQ ID NO: 54 - DNA, 2741 bp, Homo sapiens
ggcacgagggagagagaactagtctcgagtttttttttttttttttgtgcaggtaggaaatgtctttattattggccttgagtcatcatgtagtgtctgacataggttacgtgtccagaggatctgcctggcacacgctagctacccctgcccactggagcagcccctctggccgacgccaggcctttgtccatcatgccagggaagccaaccccaccatcccacaagttcatgctaggggtgctgaggaacaaggctgtcctaggattggaccctccatcctggacaggggtcctggggaggatgaggctgaggcctggatgatcagtctctttttggtttcatgatcatttaaaaaacagaaaagacaaacatttcacagtctttaaaaaatagaagtctgaggagagaagccagagtcctgggccccgggaggcccctcgaggcctcagcattccctgtcccttgaggtctgtctgcaggcctggccacagcacacgtggcccgttattggagccaggcctacaccccagcaaccatgtccaagggacctgcagttggtattgatcttggcaccacctactcttgtgtgggtgttttccagcacggaaaagtcgagataattgccaatgatcagggaaaccgaaccactccaagctatgtcgcctttacggacactgaacggttgatcggtgatgccgcaaagaatcaagttgcaatgaaccccaccaacacagtttttgatgccaaacgtctgattggacgcagatttgatgatgctgttgtccagtctgatatgaaacattggccctttatggtggtgaatgatgctggcaggcccaaggtccaagtagaatacaagggagagaccaaaagcttctatccagaggaggtgtcttctatggttctgacaaagatgaaggaaattgcagaagcctaccttgggaagactgttaccaatgctgtggtcacagtgccagcttactttaatgactctcagcgtcaggctaccaaagatgctggaactattgctggtctcaatgtacttagaattattaatgagccaactgctgctgctattgcttacggcttagacaaaaaggttggagcagaaagaaacgtgctcatctttgacctgggaggtggcacttttgatgtgtcaatcctcactattgaggatggaatctttgaggtcaagtctacagctggagacacccacttgggtggagaagattttgacaaccgaatggtcaaccattttattgctgagtttaagcgcaagcataagaaggacatcagtgagaacaagagagctgtaagacgcctccgtactgcttgtgaacgtgctaagcgtaccctctcttccagcacccaggccagtattgagatcgattctctctatgaaggaatcgacttctatacctccattacccgtgcccgatttgaagaactgaatgctgacctgttccgtggcaccctggacccagtagagaaagcccttcgagatgccaaactagacaagtcacagattcatgatattgtcctggttggtggttctactcgtatccccaagattcagaagcttctccaagacttcttcaatggaaaagaactgaataagagcatcaaccctgatgaagctgttgcttatggtgcagctgtccaggcagccatcttgtctggagacaagtctgagaatgttcaagatttgctgctcttggatgtcactcctctttcccttggtattgaaactgctggtggagtcatgactgtcctcatcaagcgtaataccaccattcctaccaagcagacacagaccttcactacctattctgacaaccagcctggtgtgcttattcaggtttatgaaggcgagcgtgccatgacaaaggataacaacctgcttggcaagtttgaactcacaggcatacctcctgcaccccgaggtgttcctcagattgaagtcacttttgacattgatgccaatggtatactcaatgtctctgctgtggacaagagtacgggaaaagagaacaagattactatcactaatgacaagggccgtttgagcaaggaagacattgaacgtatggtccaggaagctgagaagtacaaagctgaagatgagaagcagagggacaaggtgtcatccaagaattcacttgagtcctatgccttcaacatgaaagcaactgttgaagatgagaaacttcaaggcaagattaacgatgaggacaaacagaagattctggacaagtgtaatgaaattatcaactggcttgataagaatcagactgctgagaaggaagaatttgaacatcaacagaaagagctggagaaagtttgcaaccccatcatcaccaagctgtaccagagtgcaggaggcatgccaggaggaatgcctgggggatttcctggtggtggagctcctccctctggtggtgcttcctcagggcccaccattgaagaggttgattaagccaaccaagtgtagatgtagcattgttccacacatttaaaacatttgaaggacctaaattcgtagcaaattctgtggcagttttaaaaagttaagctgctatagtaagttactgggcattctcaatacttgaatatggaacatatgcacaggggaaggaaataacattgcactttataaacactgtattgtaagtggaaaatgcaatgtcttaaataaaactatttaaaattggcaccataaaaaaaaaaaaaaaaaaaaa

SEQ ID NO: 55 - DNA, 3927 bp, Homo sapiens
agcagcgagtccttgcctcccggcggctcaggacgagggcagatctcgttctggggcaagccgttgacactcgctccctgccaccgcccgggctccgtgccgccaagttttcattttccaccttctctgcctccagtcccccagcccctggccgagagaagggtcttaccggccgggattgctggaaacaccaagaggtggtttttgttttttaaaacttctgtttcttgggagggggtgtggcggggcaggatgagcaactccgttcctctgctctgtttctggagcctctgctattgctttgctgcggggagccccgtaccttttggtccagagggacggctggaagataagctccacaaacccaaagctacacagactgaggtcaaaccatctgtgaggtttaacctccgcacctccaaggacccagagcatgaaggatgctacctctccgtcggccacagccagcccttagaagactgcagtttcaacatgacagctaaaacctttttcatcattcacggatggacgatgagcggtatctttgaaaactggctgcacaaactcgtgtcagccctgcacacaagagagaaagacgccaatgtagttgtggttgactggctccccctggcccaccagctttacacggatgcggtcaataataccagggtggtgggacacagcattgccaggatgctcgactggctgcaggagaaggacgatttttctctcgggaatgtccacttgatcggctacagcctcggagcgcacgtggccgggtatgcaggcaacttcgtgaaaggaacggtgggccgaatcacaggtttggatcctgccgggcccatgtttgaaggggccgacatccacaagaggctctctccggacgatgcagattttgtggatgtcctccacacctacacgcgttccttcggcttgagcattggtattcagatgcctgtgggccacattgacatctaccccaatgggggtgacttccagccaggctgtggactcaacgatgtcttgggatcaattgcatatggaacaatcacagaggtggtaaaatgtgagcatgagcgagccgtccacctctttgttgactctctggtgaatcaggacaagccgagttttgccttccagtgcactgactccaatcgcttcaaaaaggggatctgtctgagctgccgcaagaaccgttgtaatagcattggctacaatgccaagaaaatgaggaacaagaggaacagcaaaatgtacctaaaaacccgggcaggcatgcctttcagagtttaccattatcagatgaaaatccatgtcttcagttacaagaacatgggagaaattgagcccaccttttacgtcaccctttatggcactaatgcagattcccagactctgccactggaaatagtggagcggatcgagcagaatgccaccaacaccttcctggtctacaccgaggaggacttgggagacctcttgaagatccagctcacctgggagggggcctctcagtcttggtacaacctgtggaaggagtttcgcagctacctgtctcaaccccgcaaccccggacgggagctgaatatcaggcgcatccgggtgaagtctggggaaacccagcggaaactgacattttgtacagaagaccctgagaacaccagcatatccccaggccgggagctctggtttcgcaagtgtcgggatggctggaggatgaaaaacgaaaccagtcccactgtggagcttccctgagggtgcccgggcaagtcttgccagcaaggcagcaagacttcctgctatccaagcccatggaggaaagttactgctgaggacccacccaatggaaggattcttctcagccttgaccctggagcactgggaacaactggtctcctgtgatggctgggactcctcgcgggaggggactgcgctgctatagctcttgctgcctctcttgaatagctctaactccaaacctctgtccacacctccagagcaccaagtccagatttgtgtgtaagcagctgggtgcctggggcctctcgtgcacactggattggtttctcagttgctgggcgagcctgtactctgcctgacgaggaacgctggctccgaagaggccctgtgtagaaggctgtcagctgctcagcctgctttgagcctcagtgagaagtccttccgacaggagctgactcatgtcaggatggcaggcctggtatcttgctcgggccctagctgttggggttctcatgggttgcactgaccatactgcttacgtcttagccattccgtcctgctccccagctcactctctgaagcacacatcattggctttcctatttttctgttcattttttaattgagcaaatgtctattgaacacttaaaattaattagaatgtggtaatggacatattactgagcctctccatttggaacccagtggagttgggatttctagaccctctttctgtttggatggtgtatgtgtatatgcatggggaaaggcacctggggcctgggggaggctataggatataagcattagggaccctgaggctttaagtggtttctatttcttcttagttattatgtgccaccttcttagttattatgtgccacctcccctatgagtgacgtgtttgatcactagcagaatagcaagcagagtatcattcatgctggggccagaatgatggccggttgccagatataactgctttggagcaaatctcttctgtttagagagatagaagttatgacatatgtaatacacatctgtgtacacagaaaccggcacctgccagacagagctggttctaagatttaatacagtgctttttttcctctttgaaatattttactttaataccagtgccttttcttgttgaacttcttggaaaagccaccaattctagatcttgatttgaattaatacacacaatatctgagacacttacacttttcaaaagatttgtgtatgcattgcctaattagagtagggggagaagggcaactattattatccctattttacaaaactgaggcttagtgaggttcagccacatgcctagacttatatactagttagtggtgcagccagggagaggactcagatttcctggaggcaaagtctatctctgaaactccatgaagacttttgcagccagttcccaccaatatgccccagacgtgagacaaacaaggacttttttttttatatagagccatccataaaatcctaagcccttttattaatgtataaccaggagaacatctgtgccaacggttggactttttatggctgagattcgggaggaagtgtgacaccaagcaggagaggaagaatgattttctttgtacttaggttttctaaggacattgttttaatctgtatcgtgccaaagttgtatcactgttaaacttctgaagacataaccagttgagtcttatttcaagatatgttctcaagccaattgtgtgcttctcttgtttctgtgattgctttctagccaaagcgaagcttgtacaggttgagtatcccttatccaaaatgcttggaaccagaagtgtttcaaattttagattattttcagattttggaatgtttgcatatacataatgagatattttgggaataggacccgagcctaaacacaaaattcattgatgtgtcagttacaccttatccacatagcctgagggtaattttatacgatattttaaatagttgtgtacatgaagcatggtttgtggtaacttatgtgaggggttttcccattttttgtcttgttggtgctcaaaaagttttggattttggagcatttcggattttggatttttggattagggttgctcaacccatattattggctgtacatcctggtcacttctgacttctgtttttactaatggaagctttgca

SEQ ID NO: 56 - DNA, 1217 bp, Homo sapiens
caactcatggcggcggcggcggcggcggcagctgcttgggcgcggtgcggtggtgactgagctacgagcctggcggcgggtgtgcgccgagccccggcccggcccggccctcgcgtgcctcccaggctccgcacccctgatgctgcgcgggtgctgagcccgcttcggccgggacgatggtgaagtatttcctgggccagagcgtgctccggagttcctgggaccaagtgttcgccgccttctggcagcggtacccgaatccctatagcaaacatgtcttgacggaagacatagtacaccgggaggtgacccctgaccagaaactgctgtcccggcgactcctgaccaagaccaacaggatgccacgctgggccgagcgactatttcctgccaatgttgctcactcggtgtacgtcctggaggactctattgtggacccacagaatcagaccatgactaccttcacctggaacatcaaccacgcccggctgatggtggtggaggaacgatgtgtttactgtgtgaactctgacaacagtggctggactgaaatccgccgggaagcctgggtctcctctagcttatttggtgtctccagagctgtccaggaatttggtcttgcccggttcaaaagcaacgtgaccaagactatgaagggttttgaatatatcttggctaagctgcaaggcgaggccccttccaaaacacttgttgagacagccaaggaagccaaggagaaggcaaaggagacggcactggcagctacagagaaggccaaggacctcgccagcaaggcggccaccaagaagcagcagcagcagcaacagtttgtgtagccagtctaccaccaccacagcaccccagacagctaggcttagcccctctgccctcccttcattgtactttatcattaaaaatcaacttccagccctgtctgctgtctacgtggtgggttgtggggatgcagtttggcatctgcagtacaccaagcacatgattcatgtctgagccaggtctgcttattctcccattgggcagctgaggaccgaggcacagaggtgcggtgacttgcccggggctccaggtagcctgcaggttaactggcggtaagtgctagactgtaagcccgacaagggcagggcttttggttttgttctctgatgtgtctcagtatctagcacataatagacactcaataaatacttgttgaattcaaa

SEQ ID NO: 57 - DNA, 892 bp, Homo sapiens
ggcgcctcagcccagccgcgtgccttggcccatggccgcctactcttaccgccccggccctggggccggccctgggcctgctgcaggcgcggcgctgccggaccagagcttcctgtggaacgttttccagagggtcgataaagacaggagtggagtgatatcagacaccgagcttcagcaagctctctccaacggcacgtggactccctttaatccagtgactgtcaggtcgatcatatccatgtttgaccgtgagaacaaggccggcgtgaacttcagcgagttcacgggtgtgtggaagtacatcacggactggcagaacgtcttccgcacgtacgaccgggacaactccgggatgatcgataagaacgagctgaagcaggccctctcaggtttcggctaccggctctctgaccagttccacgacatcctcattcgaaagtttgacaggcagggacgggggcagatcgccttcgacgacttcatccagggctgcatcgtcctgcagaggttgacggatatattcagacgttacgacacggatcaggacggctggattcaggtgtcgtacgaacagtacctgtccatggtcttcagtatcgtatgaccctggcctctcgtgaagagcagcacaacatggaaagagccaaaatgtcacagttcctatctgtgagggaatggagcacaggtgcagttagatgctgttcttcctttagattttgtcacgtggggacccagctgtacatatgtggataagctgattaatggttttgcaactgtaatagtagctgtatcgttctaatgcagacattggatttggtgactgtctcattgtgccatgaggtaaatgtaatgtttcaggcattctgcttgcaaaaaatctatcatgtgc

SEQ ID NO: 58 - DNA, 2340 bp, Homo sapiens
gtctgaacctctgccagtcctggagactggtgccctgagctccaaccagcgggcctcatcctacaccctcaccaccgcaacttctcacccgagcaagaagcagctcccagagagaaagaacgttcccacctgcctagccatgggagaggacgctgcacaggccgaaaagttccagcaccctgggtctgacatgcggcaggaaaagccctcgagccccagcccgatgccttcctccacaccaagccccagcctgaacctagggaacacagaggaggccatccgggacaactcacaggtgaacgcagtcacggtgctcacgctcctggacaagctggtgaacatgctagacgctgtgcaggagaaccagcacaagatggagcagcgacagatcagtttggagggctccgtgaagggcatccagaatgacctcaccaagctctccaagtaccaggcctccaccagcaacacggtgagcaagctgctggagaagtcccgcaaggtcagcgcccacacgcgcgcggtcaaagagcgcatggataggcagtgcgcacaggtgaagcggctggagaacaaccacgcccagctcctccgacgcaaccatttcaaagtgctcatcttccaggaggaaaatgagatccctgccagcgtgtttgtgaaacagcccgtttccggtgccgtggaagggaaggaggagcttccggatgaaaacaaatccctggaggaaaccctgcacaccgtggacctctcctcagatgatgatttgccccacgatgaggaggccctggaagacagtgccgaggaaaaggtggaagaaagtagggcagagaaaataaaaagatccagcctgaagaaagtggatagcctcaagaaagcattttctcgccagaacatcgagaaaaagatgaacaagctggggacaaagatcgtatctgtagagaggagagagaagattaagaaatctctcacgtcaaatcaccagaaaatatcctcaggaaaaagctcccccttcaaggtttctcccctcactttcgggcggaagaaagtccgagagggagaaagccatgcagaaaatgagaccaagtcagaagacctgcctagcagtgagcagatgccaaatgaccaggaagaggagtcctttgcagagggtcattccgaagcgtccctcgccagcgctctggtggaaggggaaattgcagaggaggctgctgagaaggcgacctccagggggagtaactcggggatggacagcaacatcgacttgactattgtggaagatgaagaggaggagtcagtggccctggaacaggcacagaaggtacgctatgagggtagctacgcgctaacatccgaggaggcggagcgctccgatggggaccccgtgcagcccgccgtgctccaggtgcaccagacctcctgagcttagagccaccgtgccatcctgtgctgtgctcaagcgggcagccagggctgaagaacaaactcttgcacatctccagcacgactcacccactcctgcgttcctgtccaggcagtaatcattgaccatatagtcatagtaagacacacgagaccaggctttaccatgaaagcgacctgtcacggactccacttttaatttgctcttaggttctatctctgtagaatgtctccaagattgaagaagaaactgagcagttgaaaaatgctaatctctttgacttagtcagaaaaaaacagaggataattaagatactagtcatgaaaagtgattcattcttttttgtcattccataagcttgctgaatagtgtaccggtaatatattgtatttccaccgtactctgtgaatctaattattattctttaagtgttgatatataatatacataaatatgtaagctaaacatataactatatgttttaagaagaaaacatctacgaaaggtaaaaagagatgatcagttggttgtttacttgctagaaaccattgttttattgcaaacgaaggaaaaatgaagagattataaaagtcagctaatgaagtaagatacgtagtaaagtcaggactattcaaaaagtaagaaagaaaatttggaaaatgagagaaacaggaaacaaagaatgccgaaaagaatgaaaacagagaaaaaatgtatgtgcttgaaagtaaaatacttacaatagtagcttaactatttcactctttaaataaaaatactaaagaagttcgtatatcctggaataacatgtcatcttcaaaatatttttattttctaatatttttaataataaacattttatagtgttaaagctgtatttttcttaataaataaaggacattacaaataaaaaaaaaaaaaaa

SEQ ID NO: 59 - DNA, 2075 bp, Homo sapiens
gccataaaggccgccgcgcgcccacgcgcctcgcttgctgcgcgctgccggcgctccttcctcctcggctcgcgtctcactcagtgtaccttctagtcccgccatggccgctctcacccgggacccccagttccagaagctgcagcaatggtaccgcgagcaccgctccgagctgaacctgcgccgcctcttcgatgccaacaaggaccgcttcaaccacttcagcttgaccctcaacaccaaccatgggcatatcctggtggattactccaagaacctggtgacggaggacgtgatgcggatgctggtggacttggccaagtccaggggcgtggaggccgcccgggagcggatgttcaatggtgagaagatcaactacaccgagggtcgagccgtgctgcacgtggctctgcggaaccggtcaaacacacccatcctggtagacggcaaggatgtgatgccagaggtcaacaaggttctggacaagatgaagtctttctgccagcgtgtccggagcggtgactggaaggggtacacaggcaagaccatcacggacgtcatcaacattggcattggcggctccgacctgggacccctcatggtgactgaagcccttaagccatactcttcaggaggtccccgcgtctggtatgtctccaacattgatggaactcacattgccaaaaccctggcccagctgaaccccgagtcctccctgttcatcattgcctccaagacctttactacccaggagaccatcacgaatgcagagacggcgaaggagtggtttctccaggcggccaaggatccttctgcagtggcgaagcactttgttgccctgtctactaacacaaccaaagtgaaggagtttggaattgaccctcaaaacatgttcgagttctgggattgggtgggaggacgctactcgctgtggtcggccatcggactctccattgccctgcacgtgggttttgacaacttcgagcagctgctctcgggggctcactggatggaccagcacttccgcacgacgcccctggagaagaacgcccccgtcttgctggccctgctgggtatctggtacatcaactgctttgggtgtgagacacacgccatgctgccctatgaccagtacctgcaccgctttgctgcgtacttccagcagggcgacatggagtccaatgggaaatacatcaccaaatctggaacccgtgtggaccaccagacaggccccattgtgtggggggagccagggaccaatggccagcatgctttttaccagctcatccaccaaggcaccaagatgataccctgtgacttcctcatcccggtccagacccagcaccccatacggaagggtctgcatcacaagatcctcctggccaacttcttggcccagacagaggccctgatgaggggaaaatcgacggaggaggcccgaaaggagctccaggctgcgggcaagagtccagaggaccttgagaggctgctgccacataaggtctttgaaggaaatcgcccaaccaactctattgtgttcaccaagctcacaccattcatgcttggagccttggtcgccatgtatgagcacaagatcttcgttcagggcatcatctgggacatcaacagctttgaccagtggggagtggagctgggaaagcagctggctaagaaaatagagcctgagcttgatggcagtgctcaagtgacctctcacgacgcttctaccaatgggctcatcaacttcatcaagcagcagcgcgaggccagagtccaataaactcgtgctcatctgcagcctcctctgtgactcccctttctcttctcgtccctcctccccggagccggcactgcatgttcctggacaccacccagagcaccctctggttgtgggcttggaccacgagcccttagcagggaaggctggtctcccccagcctaacccccagcccctccatgtctatgctccctctgtgttagaattggctgaagtgtttttgtgcagctgacttttctgacccatgttcacgttgttcacatcccatgtagaaaaataaagatgccacggaggaggt

SEQ ID NO: 60 - DNA, 781 bp, Homo sapiens
atgacccaccaatcacatgcctatcatatagtaaaacccagcccatgacccctaacaggggccctctcagccctcctaatgacctccggcctagccatgtgatttcacttccactccataacgctcctcatactaggcctactaaccaacacactaaccatataccaatgatggcgcgatgtaacacgagaaagcacataccaaggccaccacacaccacctgtccaaaaaggccttcgatacgggataatcctatttattacctcagaagtttttttcttcgcaggatttttctgagccttttaccactccagcctagcccctaccccccaattaggagggcactggcccccaacaggcatcaccccgctaaatcccctagaagtcccactcctaaacacatccgtattactcgcatcaggagtatcaatcacctgagctcaccatagtctaatagaaaacaaccgaaaccaaataattcaagcactgcttattacaattttactgggtctctattttaccctcctacaagcctcagagtacttcgagtctcccttcaccatttccgacggcatctacggctcaacattttttgtagccacaggcttccacggacttcacgtcattattggctcaactttcctcactatctgcttcatccgccaactaatatttcactttacatccaaacatcactttggcttcgaagccgccgcctgatactggcattttgtagatgtggtttgactatttctgtatgtctccatctattgatgagggt

SEQ ID NO: 61 - DNA, 1748 bp, Homo sapiens
ggcacgaggctcctgcttctctccgggtctcccgctccagctccagccccacccggccggtcccgcacggctccgggtagccatggaggacgcagcggcgctggagctttcgtcggacgaggcggtggaggttgaggaggttattgaggagtcccgcgcagagcgtatcaagcgcagcggcctgcggcgcgtggacgacttcaagaaggccttctccaaggagaagatggagaagaccaaggtgcgtacccgcgagaacctggagaagacgcgcctcaagaccaaggaaaacctggagaagacgcggcacaccctggagaagcgcatgaacaagctgggcacgcgcctggtgcccgccgagcggcgcgagaaactgaagacgtcgcgggacaagttgcgcaaatccttcacgcccgaccacgtggtgtacgcgcgctccaagaccgcggtctacaaggtgccacccttcaccttccacgtcaagaagatccgcgagggccaggtggaagtgctcaaggccaccgagatggtggaggtgggcgccgacgacgacgagggcggcgcggagcgcggggaggccggcgacctgcggcgcgggagcagccccgacgtgcacgcgctgctggagatcaccgaggagtcggacgccgtgctggtggacaagagcgacagcgactgagccgcccccgctgccacccaccccattcctcgctccttccgaacttcctctttcgcattctctctcggctcgagctggctgagatttttctaaattgaaaacacgcccccctccccacacctccaggaactccactcccagtcttagagctgttaggacccgatggggaggcagcccccgcagtggacaacccccgcttggacacagtccgagtggaatgggaagggaatggtcaatccctgtcctggttgtccaagtcgggatctcagaggaaattgcagtgattccacggttaggcccccctgggggggctgccttcccctcagcctctccccacaccacccacccagctgctgtcattccgctcactgagctcttcttcattctcaccctgatccctgggggactcaaagccaaaactgcccaaagaggaaagattgaatcctaaaggggatccctgcccccatgggaggccccctactagaaggacgtgaaagcagcttttgggggaaactgaggcagtggggaagacagagcagaatgagccctcaccctggctgggggtccagcacaggctgtatctgcagagggtcccagaggaacgctggagccaagagaagccctgggaaggaggggtggggaacgacatgcatgtgagggatggcacactgatgtgtttatgcacctgtacacaggagcgcatggccatggctttggaaaggagaatggaaaaatagaagaaggtcggccgggcttggtggcttatgcctgtaaccccagtactttgggaggccgaggtgggcggatcacctgaagtcaggagttcgggaccagcctggcaaacaccccatctctactaagcgaaaacccatctctactaaaattacaaaaattagctgggcatggttgcgcatgcctgtaatcccagctactttggaggctgaggtggggagaattgcttgaacctgggaggtggaggttgcagtgagccaaggtcgcgacactgcactccagcctgggtgacagagtgagactccatctcaacagaaggaaaaaaaaaaaaaaaaaa

SEQ ID NO: 62 - DNA, 6480 bp, Homo sapiens
agagcgagcaggggagagcgagaccagttttaaggggaggaccggtgcgagtgaggcagccccgaggctctgctcgcccaccacccaatcctcgcctcccttctgctccaccttctctctctgccctcacctctcccccgaaaaccccctatttagccaaaggaaggaggtcaggggaacgctctcccctccccttccaaaaaacaaaaacagaaaaacccttttccaggccggggaaagcaggagggagaggggccgccgggctggccatggagctgctgtgccacgaggtggacccggtccgcagggccgtgcgggaccgcaacctgctccgagacgaccgcgtcctgcagaacctgctcaccatcgaggagcgctaccttccgcagtgctcctacttcaagtgcgtgcagaaggacatccaaccctacatgcgcagaatggtggccacctggatgctggaggtctgtgaggaacagaagtgcgaagaagaggtcttccctctggccatgaattacctggaccgtttcttggctggggtcccgactccgaagtcccatctgcaactcctgggtgctgtctgcatgttcctggcctccaaactcaaagagaccagcccgctgaccgcggagaagctgtgcatttacaccgacaactccatcaagcctcaggagctgctggagtgggaactggtggtgctggggaagttgaagtggaacctggcagctgtcactcctcatgacttcattgagcacatcttgcgcaagctgccccagcagcgggagaagctgtctctgatccgcaagcatgctcagaccttcattgctctgtgtgccaccgactttaagtttgccatgtacccaccgtcgatgatcgcaactggaagtgtgggagcagccatctgtgggctccagcaggatgaggaagtgagctcgctcacttgtgatgccctgactgagctgctggctaagatcaccaacacagacgtggattgtctcaaagcttgccaggagcagattgaggcggtgctcctcaatagcctgcagcagtaccgtcaggaccaacgtgacggatccaagtcggaggatgaactggaccaagccagcacccctacagacgtgcgggatatcgacctgtgaggatgccagttgggccgaaagagagagacgcgtccataatctggtctcttcttctttctggttgtttttgttctttgtgttttagggtgaaacttaaaaaaaaaattctgcccccacctagatcatatttaaagatcttttagaagtgagagaaaaaggtcctacgaaaacggaataataaaaagcatttggtgcctatttgaagtacagcataagggaatcccttgtatatgcgaacagttattgtttgattatgtaaaagtaatagtaaaatgcttacaggaaaacctgcagagtagttagagaatatgtatgcctgcaatatgggaacaaattagaggagacttttttttttcatgttatgagctagcacatacacccccttgtagtataatttcaaggaactgtgtacgccatttatggcatgattagattgcaaagcaatgaactcaagaaggaattgaaataaggagggacatgatggggaaggagtacaaaacaatctctcaacatgattgaaccatttgggatggagaagcacctttgctctcagccacctgttactaagtcaggagtgtagttggatctctacattaatgtcctcttgctgtctacagtagctgctacctaaaaaaagatgttttattttgccagttggacacaggtgattggctcctgggtttcatgttctgtgacatcctgcttcttcttccaaatgcagttcattgcagacaccaccatattgctatctaatggggaaatgtagctatgggccataaccaaaactcacatgaaacggaggcagatggagaccaagggtgggatccagaatggagtcttttctgttattgtatttaaaagggtaatgtggccttggcatttcttcttagaaaaaaactaatttttggtgctgattggcatgtctggttcacagtttagcattgttataaaccattccattcgaaaagcactttgaaaaattgttcccgagcgatagatgggatggtttatgcaagtcatgctgaatactcctcccctcttctcttttgccccctcccttcctgcccccagtctgggttactcttcgcttctggtatctggcgttctttggtacacagttctggtgttcctaccaggactcaagagacaccccttcctgctgacattcccatcacaacattcctcagacaagcctgtaaactaaaatctgttaccattctgatggcacagaaggatcttaattcccatctctatacttctcctttggacatggaaagaaaagttattgctggtgcaaagatagatggctgaacatcagggtgtggcattttgttcccttttccgttttttttttttttattgttgttgttaattttattgcaaagttgtattcagcgtacttgaatttttcttcctctccacttcttagaggcattcagttagcaaagaggttggagcaacaacttttttttttttttttgcacaattgtaattgacaggtaatgaagctatttgttaaaatatttgcctttttaagtaaaaaagaaaaatcagaacagggctatttgaagaattattttatacacagattctgccttgtttcatagtatgagggttgaagacggaaaacaatctaagggtctctcatttttttaattttgttttgttcagtttggtttttttttttttttgcgctgctaagaagctaaagtcatccatccttattcacgttgacagtacctagctgtaatgtttcacagagtgtgctgctattttataaacatttttataatatattattttactgcttaaattccaagtcctgaagtagatggttgagatatgagttcttcgtactggaaaagcccttccgtagtttgttttcttctggtagcatattcatggttgtttttttttttcttttttggttttttggttttttttttttcctctgatcacattcttcaaagacggagtattctttacctcaggtttactggacaaaatcaataactacaaaaggcaatgattcacgcttttgttttcataatacctcacaaccgtacagtttctgcttgggagcccattcgcatgaggaatacagaagcagtgtgagcagggctgactccctctcaggtggaaggcagggcggtctcactcccagggacctttttggtcatggaggccatcgggctcccagttagaccctggtatcctcatcatgatggaaaaaatacattgaaccaagggatcctccctccccttcaaggcagacgttcagtacaaacatttatgcggtaggctcagatgtcgtaatttgcacttaggtaccaggtgtcaggaaacagactaaaaagaattccaccaggctgtttggagatcctcatcttggagctttttcaaaagcggggcttcatctgcaaagggccctttcatcttgaagtttttcccctccgtctttcccctcccctggcatggacaccttgtgtttaggatcatctctgcaggtttcctaggtctgaatctgcgagtagatgaacctgcagcaagcagcgtttatggtgcttccttctccctcctctgtctcaaactgcgcaggcaagcactatgcaagcccaggccctctgctgagcggtactaaacggtcgggttttcaatcacactgaattggcaggataagaaaaataggtcagataagtatgggatgatagttgaagggaggtgaagaggctgcttctctacagaggtgaaattccagatgagtcagtctcttgggaagtgtgtttagaagggttcaggactttgtgagttagcatgaccctaaaattctaggggatttctggtgggacaatgggtggtgaattttgaagttttggagagggaagtggagcagccagcaagtaagctagccagagttttctcaagagccagctttgctcagcacactctcctgggccccaaggagtcccacggaatggggaaagtgggaaccctggagttcttgggaatcttggagcctaaagagaaaccgaggtgcaaattcatttcatggtgactgacccttgagcttaaacagaagcagcaaatgaaagaaccggacaaataaggaagggcacaagcctacccgactctatttacagtctgtaactttccactcttcctgtagtcccgaggcccctgggtccttctagcttttctctttcccatccttggggccttgtgtgatgatgggtgtggggctgccgatgggaaagtcgggggttgttaggcttttctgcctgctcctgcttaaacacaagaaggaatcctggattttgccctctccttagctcttagtctctttggtaggagttttgttccagaggagctctcccccttggatttgaacttgctctttttgttgttgttgttctttctcttctttttcttacctcccactaaaggggttccaaattatcctggtctttttctaccttgttgtgtttctatctcgtctttacttccatctgtttgtttttttctccatcagtgggggccgagttgttcccccagcctgccaaattttgatccttcccctcttttggccaaatcctagggggaagaaatcctagtatgccaaaaatatatgctaagcataattaaactccatgcgggtccataacagccaagaagcctgcaggagaaagccaagggcagttccctccgcagaacaccccatgcgtgctgagaggcgagctccttgaagaaggggctgttcttccaggaggccttattttgaactgcctcaggaccccactggagagcacagcatgccttactactgggtcatccttggtctatgtgctctgtactggaggctctgttctgcctcttatcagccaggtcaggggcacacatggcttaagtgacaaagccagaggagaagacaaccctgacagcatcacgctgcatcccattgctagcaggattggcaactcttcagacggagctgcgcttccctgcagtctagcacctctagggcctctccagactgtgccctgggagctctgggactgaaaggttaagaacataaggcaggatcagatgactctctccaagagggcaggggaattttctctccatgggccacaggggacagggctgggagaagaaatagacttgcaccttatgtcatgtaaataattgattttctagttcaagaagataatattggtagtgtgggaattggaggtaggaaggggaggaagtctgagtaagccagttggcttctaagccaaaaggattcctctttgtttatctctgagacagtccaaccttgagaatagctttaaaagggaaattaatgctgagatgataaagtccccttaagccaacaaaccctctgtagctatagaatgagtgcaggtttctattggtgtggactcagagcaatttacaagagctgttcatgcagccatccatttgtgcaaaatagggtaagaagattcaagaggatatttattacttcctcataccacatggcttttgatgattctggattctaaacaacccagaatggtcatttcaggcacaacgatactacattcgtgtgtgtctgcttttaaacttggctgggctatcagaccctattctcggctcaggttttgagaagccatcagcaaatgtgtacgtgcatgctgtagctgcagcctgcatcccttcgcctgcagcctactttggggaaataaagtgccttactgactgtagccattacagtatccaatgtcttttgacaggtgcctgtccttgaaaaacaaagtttctatttttatttttaattggtttagttcttaactgctggccaactcttacatccccagcaaatcatcgggccattggattttttccattatgttcatcacccttatatcatgtacctcagatctctctctctctcctctctctcagttatatagtttcttgtcttggactttttttttcttttctttttctttttttttttgctttaaaacaagtgtgatgccatatcaagtccatgttattctctcacagtgtactctataagaggtgtgggtgtctgtttggtcaggatgttagaaagtgctgataagtagcatgatcagtgtatgcgaaaaggtttttaggaagtatggcaaaaatgttgtattggctatgatggtgacatgatatagtcagctgccttttaagaggtcttatctgttcagtgttaagtgatttaaaaaaataataacctgttttctgactagtttaaagatggatttgaaaatggttttgaatgcaattaggttatgctatttggacaataaactcaccttgacct

SEQ ID NO: 63 - DNA, 2973 bp, Homo sapiens
atgtcggaagaaacccgacagagcaaattggccgcagcgaagaaaaagttgagagaatatcagcagaggaatagccctggtgttcctacaggagcgaaaaagaagaagaaaataaaaaatggcagtaaccctgagacaaccacttctggtggttgccactcacctgaggatacacccaaggacaatgctgctactctacaaccatctgatgacaccgtgttacctggcggtgtcccttcccctggtgccagtctcactagcatggcggcatctcagaatcatgatgctgacaatgtccctaatctcatggatgaaaccaagactttctcatcaaccgagagcctgcgacaactctcccaacagctcaatggtcttgtttgtgagtctgcgacatgtgtcaatggggagggccctgcatcgtctgctaacctgaaggatctggagagccggtaccaacagctagcggtagccctggactccagctatgtaacaaacaaacaactcaatatcacgatagagaaattgaaacaacagaaccaagaaattacggatcagttggaagaagaaaagaaagaatgccaccaaaagcagggagccctaagggagcagttacaggttcacattcagaccatagggatcctcgtatcagagaaagctgagttacagacagccctggctcacactcagcatgctgccaggcagaaagaaggagagtctgaagatctggccagccgcctgcagtattcccggcggcgtgtgggagagttggagcgggctctctctgctgtctccacgcagcagaagaaggcagacaggtacaacaaggagttaaccaaagagagagacgccctcaggctggagttatacaagaacacccaaagcaatgaggacctgaagcaagagaaatcagaattggaagagaagcttcgggtcctagtgactgagaaggctggcatgcagcttaacttggaagaattgcaaaagaagttagagatgacggaactcctgcttcaacagttttcaagccggtgtgaagcccctgatgctaaccagcagttacagcaggccatggaggagcgggcacagctggaagcacacctggggcaggtaatggagtcggttagacaactacaaatggagagagataaatatgcggagaatctcaaaggagagagcgccatgtggcggcagaggatgcagcagatgtcagagcaggtgcacacattgagagaggagaaggaatgtagcatgagtcgggtacaggagctggagacgagcttggctgaactgaggaaccagatggctgaacccccgcccccagagcccccagcagggccctccgaggtggagcagcagctacaagcggaggctgagcacctgcggaaggagctggagggtctggcaggacagcttcaagcccaggtgcaagacaatgagggcttgagtcgcctgaaccgggagcaggaggagaggctgctggagctggagcgggcggccgagctctggggggagcaggcggaggcgcgcaggcaaatcctggagaccatgcagaacgaccgcactaccatcagccgcgcactctcccagaaccgggagctcaaggagcagctggctgagctgcagagcggatttgtaaagctgactaatgagaacatggagatcaccagcgcactgcagtcggagcagcacgtcaagagggagctgggaaagaagctgggcgagctgcaggagaagctgagcgagctgaaggaaacggtggagctgaagagccaagaggctcaaagtctgcagcagcagcgagaccagtacctgggacacctgcagcagtatgtggccgcctatcagcagctgacctctgagaaggaggtgctgcataatcagctactgctgcagacccagctcgtggaccagctgcagcagcaggaagctcagggcaaagcggtggccgagatggcccgccaagagttgcaggaaacccaggagcgcctggaagctgccacccagcagaatcagcagctacgggcccagttgagcctcatggctcaccctggggaaggagatggactggaccgggaggaggaggaggatgaggaggaggaggaggaggaggcggtggcagtacctcagcccatgccaagcatcccggaggacctggagagccgggaagccatggtggcatttttcaactcagctgtagccagtgccgaggaggagcaggcaaggctacgtgggcagctgaaggagcaaagggtgcgctgccggcgcctggctcacctgctggcctcggcccagaaggagcctgaggcagcagccccagccccagggaccgggggtgattctgtgtgtggggagacccaccgggccctgcagggggccatggagaagctgcagagccgctttatggagctcatgcaggagaaggcagacctgaaggagagggtagaggaactggaacatcgctgcatccagctttctggagagacagacaccattggagagtacattgcactgtaccagagccagagggcagtgctgaaggagcggcaccgggagaaggaggagtacatcagcaggctggcccaagacaaggaggagatgaaggtgaagctgctggagctgcaggagctggtcttacggcttgtgggcgaccgcaacgagtggcatggcagattcctggcagctgcccagaaccctgctgatgagcccacttcaggggccccagccccccaggaacttggggctgccaaccagcagggtgatctttgcgaggtgagcctcgccggcagtgtggagcctgcccaaggagaggccagggagggttctccccgtgacaaccccactgcacagcagatcatgcagctgcttcgtgagatgcagaacccccgggagcgcccaggcttgggcagcaacccctgcattccttttttttaccgggctgacgagaatgatgaggtgaagatcactgtcatctaa

SEQ ID NO: 64 - DNA, 609 bp, Homo sapiens
ttctcttcctgctctccatcatggcgcaggatcaaggtgaaaaggagaaccccatgcgggaacttcgcatccgcaaactctgtctcaacatctgtgttggggagagtggagacagactgacgcgagcagccaaggtgttggagcagctcacagggcagacccctgtgttttccaaagctagatacactgtcagatcctttggcatccggagaaatgaaaagattgctgtccactgcacagttcgaggggccaaggcagaagaaatcttggagaagggtctaaaggtgcgggagtatgagttaagaaaaaacaacttctcagatactggaaactttggttttgggatccaggaacacatcgatctgggtatcaaatatgacccaagcattggtatctacggcctggacttctatgtggtgctgggtaggccaggtttcagcatcgcagacaagaagcgcaggacaggctgcattggggccaaacacagaatcagcaaagaggaggccatgcgctggttccagcagaagtatgatgggatcatccttcctggcaaataaattcccgtttctatccaaaagagcaataaaaagttttcagtgaaatgtgcaa

SEQ ID NO: 65 - DNA, 1833 bp, Homo sapiens
ggcacgagggtttgccgccagaacacaggtgtcgtgaaaactacccctaaaagccaaaatgggaaaggaaaagactcatatcaacattgtcgtcattggacacgtagattcgggcaagtccaccactactggccatctgatctataaatgcggtggcatcgacaaaagaaccattgaaaaatttgagaaggaggctgctgagatgggaaagggctccttcaagtatgcctgggtcttggataaactgaaagctgagcgtgaacgtggtatcaccattgatatctccttgtggaaatttgagaccagcaagtactatgtgactatcattgatgccccaggacacagagactttatcaaaaacatgattacagggacatctcaggctgactgtgctgtcctgattgttgctgctggtgttggtgaatttgaagctggtatctccaagaatgggcagacccgagagcatgcccttctggcttacacactgggtgtgaaacaactaattgtcggtgttaacaaaatggattccactgagccaccctacagccagaagagatatgaggaaattgttaaggaagtcagcacttacattaagaaaattggctacaaccccgacacagtagcatttgtgccaatttctggttggaatggtgacaacatgctggagccaagtgctaacatgccttggttcaagggatggaaagtcacccgtaaggatggcaatgccagtggaaccacgctgcttgaggctctggactgcatcctaccaccaactcgtccaactgacaagcccttgcgcctgcctctccaggatgtctacaaaattggtggtattggtactgttcctgttggccgagtggagactggtgttctcaaacccggtatggtggtcacctttgctccagtcaacgttacaacggaagtaaaatctgtcgaaatgcaccatgaagctttgagtgaagctcttcctggggacaatgtgggcttcaatgtcaagaatgtgtctgtcaaggatgttcgtcgtggcaacgttgctggtgacagcaaaaatgacccaccaatggaagcagctggcttcactgctcaggtgattatcctgaaccatccaggccaaataagcgccggctatgcccctgtattggattgccacacggctcacattgcatgcaagtttgctgagctgaaggaaaagattgatcgccgttctggtaaaaagctggaagatggccctaaattcttgaagtctggtgatgctgccattgttgatatggttcctggcaagcccatgtgtgttgagagcttctcagactatccacctttgggtcgctttgctgttcgtgatatgagacagacagttgcggtgggtgtcatcaaagcagtggacaagaaggctgctggagctggcaaggtcaccaagtctgcccagaaagctcagaaggctaaatgaatattatccctaatacctgccaccccactcttaatcagtggtggaagaacggtctcagaactgtttgtttcaattggccatttaagtttagtagtaaaagactggttaatgataacaatgcatcgtaaaaccttcagaaggaaaggagaatgttttgtggaccactttggttttcttttttgcgtgtggcagttttaagttattagtttttaaaatcagtactttttaatggaaacaacttgaccaaaaatttgtcacagaattttgagacccattaaaaaagttaaatgagaaaaaaaaaaaaaaaaaaaaaaaaaaaaaaaaaaaaaaaaaaaaaaaaaaaaaaaaaaaaaaaaaaaaaaaaaaaaaaaaaaaaaaaaaaaaaa

SEQ ID NO: 66 - DNA, 3680 bp, Homo sapiens
ggcacgaggctggggcgcagagcagcggcgggaggaggcggacacgtggcaacagcggtagcagcccgggcggcggcagcaacagcggcggcggcatcggcccgagccgccggccgccctcccaccctcccgccccgcggcagccctagctccctccacttggctcccctggtcccgctcgctcggccgggagctgctctgtgcttttctctctgattctccagcgacaggacccggcgccgggcactgagcaccgccaccatggggaagggggttggacgtgataagtatgagcctgcagctgtttcagaacaaggtgataaaaagggcaaaaagggcaaaaaagacagggacatggatgaactgaagaaagaagtttctatggatgatcataaacttagccttgatgaacttcatcgtaaatatggaacagacttgagccggggattaacatctgctcgtgcagctgagatcctggcgcgagatggtcccaacgccctcactccccctcccactactcctgaatggatcaagttttgtcggcagctctttggggggttctcaatgttactgtggattggagcgattctttgtttcttggcttatagcatccaagctgctacagaagaggaacctcaaaacgataatctgtacctgggtgtggtgctatcagccgttgtaatcataactggttgcttctcctactatcaagaagctaaaagttcaaagatcatggaatccttcaaaaacatggtccctcagcaagcccttgtgattcgaaatggtgagaaaatgagcataaatgcggaggaagttgtggttggggatctggtggaagtaaaaggaggagaccgaattcctgctgacctcagaatcatatctgcaaatggctgcaaggtggataactcctcgctcactggtgaatcagaaccccagactaggtctccagatttcacaaatgaaaaccccctggagacgaggaacattgccttcttttcaaccaattgtgttgaaggcaccgcacgtggtattgttgtctacactggggatcgcactgtgatgggaagaattgccacacttgcttctgggctggaaggaggccagacccccattgctgcagaaattgaacattttatccacatcatcacgggtgtggctgtgttcctgggtgtgtctttcttcatcctttctctcatccttgagtacacctggcttgaggctgtcatcttcctcatcggtatcatcgtagccaatgtgccggaaggtttgctggccactgtcacggtctgtctgacacttactgccaaacgcatggcaaggaaaaactgcttagtgaagaacttagaagctgtggagaccttggggtccacatccaccatctgctctgataaaactggaactctgactcagaaccggatgacagtggcccacatgtggtttgacaatcaaatccatgaagctgatacgacagagaatcagagtggtgtctcttttgacaagacttcagctacctggcttgctctgtccagaattgcaggtctttgtaacagggcagtgtttcaggctaaccaggaaaacctacctattcttaagcgggcagttgcaggagatgcctctgagtcagcactcttaaagtgcatagagctgtgctgtggttccgtgaaggagatgagagaaagatacgccaaaatcgtcgagatacccttcaactccaccaacaagtaccagttgtctattcataagaaccccaacacatcagagccccaacacctgttggtgatgaagggcgccccagaaaggatcctagaccgttgcagctctatcctcctccacggcaaggagcagcccctggatgaggagctgaaagacgcctttcagaacgcctatttggagctggggggcctcggagaacgagtcctaggtttctgccacctctttctgccagatgaacagtttcctgaagggttccagtttgacactgacgatgtgaatttccctatcgataatctgtgctttgttgggctcatctccatgattgaccctccacgggcggccgttcctgatgccgtgggcaaatgtcgaagtgctggaattaaggtcatcatggtcacaggagaccatccaatcacagctaaagctattgccaaaggtgtgggcatcatctcagaaggcaatgagaccgtggaagacattgctgcccgcctcaacatcccagtcagccaggtgaaccccagggatgccaaggcctgcgtagtacacggcagtgatctaaaggacatgacctccgagcagctggatgacattttgaagtaccacactgagatagtgtttgccaggacctcccctcagcagaagctcatcattgtggaaggctgccaaagacagggtgctatcgtggctgtgactggtgacggtgtgaatgactctccagctttgaagaaagcagacattggggttgctatggggattgctggctcagatgtgtccaagcaagctgctgacatgattcttctggatgacaactttgcctcaattgtgactggagtagaggaaggtcgtctgatctttgataacttgaagaaatccattgcttataccttaaccagtaacattcccgagatcaccccgttcctgatatttattattgcaaacattccactaccactggggactgtcaccatcctctgcattgacttgggcactgacatggttcctgccatctccctggcttatgagcaggctgagagtgacatcatgaagagacagcccagaaatcccaaaacagacaaacttgtgaatgagcggctgatcagcatggcctatgggcagattggaatgatccaggccctgggaggcttctttacttactttgtgattctggctgagaacggcttcctcccaattcacctgttgggcctccgagtggactgggatgaccgctggatcaacgatgtggaagacagctacgggcagcagtggacctatgagcagaggaaaatcgtggagttcacctgccacacagccttcttcgtcagtatcgtggtggtgcagtgggccgacttggtcatctgtaagaccaggaggaattcggtcttccagcaggggatgaagaacaagatcttgatatttggcctctttgaagagacagccctggctgctttcctttcctactgccctggaatgggtgttgctcttaggatgtatcccctcaaacctacctggtggttctgtgccttcccctactctcttctcatcttcgtatatgacgaagtcagaaaactcatcatcaggcgacgccctggcggctgggtggagaaggaaacctactattagccccccgtcctgcacgccgtggagcatcaggccacacactctgcatccgacacccaccccctctttgtgtacttcagtcttggagtttggaactctaccctggtaggaaagcaccgcagcatgtggggaagcaagacgtcctggaatgaagcatgtagctctatggggggaggggggagggctgcctgaaaaccatccatctgtggaaatgacagcggggaaggtttttatgtgcctttttgtttttgtaaaaaaggaacacccggaaagactgaaagaatacattttatatctggatttttacaaataaagatggctattataatggaaaaaaaaaaaaaaaaaaa

SEQ ID NO: 67 - DNA, 3028 bp, Homo sapiens
gaagaggttcggcggctgatggcggatcaggatcggaagcctgcgtaactttctcccttgatccgggagtctttccactggattcacaatgacatcctttcaagaagtcccattgcagacttccaactttgcccatgtcatctttcaaaatgtggccaagagttaccttcctaatgcacacctggaatgtcattacaccttaactccatatattcatccacatccaaaagattgggttggtatattcaaggttggatggagtactgctcgtgattattacacgtttttatggtcccctatgcctgaacattatgtggaaggatcaacagtcaattgtgtactagcattccaaggatattaccttccaaatgatgatggagaattttatcagttctgttacgttacccataagggtgaaattcgtggagcaagtacacctttccagtttcgagcttcttctccagttgaagagctgcttactatggaagatgaaggaaattctgacatgttagtggtgaccacaaaagcaggccttcttgagttgaaaattgagaaaaccatgaaagaaaaagaagaactgttaaagttaattgccgttctggaaaaagaaacagcacaacttcgagaacaagttgggagaatggaaagagaacttaaccatgagaaagaaagatgtgaccaactgcaagcagaacaaaagggtcttactgaagtaacacaaagcttaaaaatggaaaatgaagagtttaagaagaggttcagtgatgctacatccaaagcccatcagcttgaggaagatattgtgtcagtaacacataaagcaattgaaaaagaaaccgaattagacagtttaaaggacaaactcaagaaggcacaacatgaaagagaacaacttgaatgtcagttgaagacagagaaggatgaaaaggaactttataaggtacatttgaagaatacagaaatagaaaataccaagcttatgtcagaggtccagactttaaaaaatttagatgggaacaaagaaagcgtgattactcatttcaaagaagagattggcaggctgcagttatgtttggctgaaaaggaaaatctgcaaagaactttcctgcttacaacctcaagtaaagaagatacttgttttttaaaggagcaacttcgtaaagcagaggaacaggttcaggcaactcggcaagaagttgtctttctggctaaagaactcagtgatgctgtcaacgtacgagacagaacgatggcagacctgcatactgcacgcttggaaaacgagaaagtgaaaaagcagttagctgatgcagtggcagaacttaaactaaatgctatgaaaaaagatcaggacaagactgatacactggaacacgaactaagaagagaagttgaagatctgaaactccgtcttcagatggctgcagaccattataaagaaaaatttaaggaatgccaaaggctccaaaaacaaataaacaaactttcagatcaatcagctaataataataatgtcttcacaaagaaaacggggaatcagcagaaagtgaatgatgcttcagtaaacacagacccagccacttctgcctctactgtagatgtaaagccatcaccttctgcagcagaggcagattttgacatagtaacaaaggggcaagtctgtgaaatgaccaaagaaattgctgacaaaacagaaaagtataataaatgtaaacaactcttgcaggatgagaaagcaaaatgcaataaatatgctgatgaacttgcaaaaatggagctgaaatggaaagaacaagtgaaaattgctgaaaatgtaaaacttgaactagctgaagtacaggacaattataaagaacttaaaaggagtctagaaaatccagcagaaaggaaaatggaaggtcagaattcccagagtcctcaatgtttcaaaacatgctcagagcaaaatggttatgttctcacattgtcaaatgcacaaccagttctgcaatatggtaatccttatgcatctcaggaaacaagagatggagcagatggtgctttttacccagatgaaatacaaaggccacctgtcagagtcccctcttggggactggaagacaatgttgtctgcagccagcctgctcgaaactttagtcggcctgatggcttagaggactctgaggatagcaaagaagatgagaatgtgcctactgctcctgatcctccaagtcaacatttacgtgggcatgggacaggcttttgctttgattccagctttgatgttcacaagaagtgtcccctctgtgagttaatgtttcctcctaactatgatcagagcaaatttgaagaacatgttgaaagtcactggaaggtgtgcccgatgtgcagcgagcagttccctcctgactatgaccagcaggtgtttgaaaggcatgtgcagacccattttgatcagaatgttctaaattttgactagttactttttattatgagttaatatagtttagcagtaaaaaaaaaaaaaaaaaaccacacctaaaatagaccactgaggagaccatagagcggatgctttcatgcaccctttactgcactttctgaccaggagctactttgagtttggtgttactaggatcagggtcagtctttggcttatcaataaattttaatctctgttaatcttacctgctttaaaaaaaagttcttgtgtgttcgtatctttatttattccctagtttgcagaactgtctgaataaaggatacaaggattatttcaatgttactgcactgaaaaacgtgtatgtattagtgtgctagattatttagcagaatattcacaagtttctgttgaccttgttgattgagcatgactactaaatattatgtaataaaaagcatttgtcataacaaaaaaaaaaaaaaaaaaaaaaaaaaaaaaaaaaaaaaaaaaaaaaaaaaaaaaaaaaaaaaaaaaaaaaaaaaaaaaaaaaaaaaaaaaaaaaaaaaaaaaaaaaaaaaaaaaaaaaaaaaaaaaaaaaaaaaaaaa

SEQ ID NO: 68 - DNA, 6830 bp, Homo sapiens
ccacggtaaggggatgacgtagctttgccaaagacttagaagctaagcagaaaatgagcttaacatcctggtttttggtgagcagtggaggcactcgccacaggctgccacgagaaatgatttttgttggaagagatgactgtgagctcatgttgcagtctcgtagtgtggataagcaacacgctgtcatcaactatgatgcgtctacggatgagcatttagtgaaggatttgggcagcctcaatgggacttttgtgaatgatgtaaggattccggaacagacttatatcaccttgaaacttgaagataagctgagatttggatatgatacaaatcttttcactgtagtacaaggagaaatgagggtccctgaagaagctcttaagcatgagaagtttaccattcagcttcagttgtcccaaaaatcttcagaatcagaattatccaaatctgcaagtgccaaaagcatagattcaaaggtagcagacgctgctactgaagtgcagcacaaaactactgaagcactgaaatccgaggaaaaagccatggatatttctgctatgccccgtggtactccattatatgggcagccgtcatggtggggggatgatgaggtggatgaaaaaagagctttcaagacaaatggcaaacctgaagaaaaaaaccatgaagctggaacatcagggtgcagcatagatgccaagcaagttgaggaacaatctgcagctgcaaatgaagaagtactttttcctttctgtagggaaccaagttattttgaaatccctacaaaagaattccagcaaccatcacaaataacagaaagcactattcatgaaatcccaacaaaagacacgccaagttcccatataacaggtgcagggcatgcttcatttaccattgaatttgatgacagtaccccagggaaggtaactattagagaccatgtgacaaagtttacttctgatcagcgccacaagtccaagaagtcttctcctggaactcaagacttgctggggattcaaacaggaatgatggcacccgaaaacaaagttgctgactggctagcacaaaacaaccctcctcaaatgctatgggaaagaacagaagaggattctaaaagcattaaaagtgatgttccagtgtacttgaaaaggttgaaaggaaataaacatgatgatggtacgcaaagtgattcagagaacgctggggctcacaggcgctgtagcaaacgtgcaactcttgaggaacacttaagacgccaccattcagaacacaaaaagctacagaaggtccaggctactgaaaagcatcaagaccaagctgttactagctctgcgcatcacagaggggggcatggtgttccacatgggaaattgttaaaacagaaatcagaggagccatcggtgtcaatacccttcctacaaactgcattattaagaagttcagggagtcttgggcacagaccaagccaggagatggataaaatgttaaaaaatcaagcaacttctgctacttctgaaaaggataatgatgatgaccaaagtgacaagggtacttataccattgagttagagaatcccaacagtgaggaagtggaagcaagaaaaatgattgacaaggtgtttggagtagatgacaatcaggattataataggcctgttatcaacgaaaaacataaagatctaataaaagattgggctctcagttctgctgcagcagtaatggaagaaagaaaaccactgactacatctggatttcaccactcagaggaaggcacatcttcatctggaagcaaacgttgggtttcacagtgggctagtttggctgccaatcatacaaggcatgatcaagaagaaaggataatggaattttctgcacctcttcctttagagaatgagacagagatcagtgagtctggcatgacagtgagaagtactggctctgcaacttccttggctagccagggagagagaaggagacgaactcttccccagcttccaaatgaagaaaagtctcttgagagccacagagcaaaggttgtaacacagaggtcagagataggagaaaaacaagacacagaacttcaggagaaagaaacacctacacaggtataccagaaagataaacaagatgctgacagacccttgagtaaaatgaacagggcagtaaatggagagactctcaaaactggtggagataataaaaccctacttcacttaggcagctctgctcctggaaaagagaaaagtgaaactgataaggaaacttctttggtaaagcaaacattagcaaaacttcaacaacaagaacaaagggaggaggctcagtggacacctactaaattgtcttccaaaaatgtttcaggtcagacagataaatgtagggaggaaacttttaaacaagaatcacaacctccagaaaaaaattcaggacattctacaagcaaaggagacagagtggcacaaagtgagagcaagagaagaaaagctgaggaaattctgaaaagtcagactccaaagggaggagacaagaaggaatcctccaagtcattagtgcgacaagggagcttcactatagaaaaacccagcccaaacatacccatagaacttattccccatataaataaacagacttcctctactccttcttctttagcattaacatctgcaagtagaatacgagaaagaagtgagtctttggatcctgattctagtatggacacaacccttattctaaaagacacagaagcagtaatggcttttctagaagctaaactacgtgaagataataaaactgatgaaggaccagatactcccagttataatagagacaattctatttcaccagaatctgatgtagatacagctagtacaatcagtctggttactggagaaactgaaagaaagtcaacccaaaagcgaaagagtttcactagcctctataaagataggtgttccacaggttctccttccaaagatgttacaaaatcatcatcttcaggtgctagggaaaaaatggaaaagaaaacaaaaagtcgttccacagatgtgggttcaagagcagatggtcgtaaatttgttcagtccagtgggagaataagacagccctcagtagacttaacagatgatgaccaaacctctagtgtacctcattctgccatctctgatattatgtcatctgatcaagaaacttactcttgtaaacctcatggacggactccacttacctcagctgatgagcatgtacattccaaactggaaggaagtaaagtaacgaaatctaagacttctccggtggtatctggttcatctagtaaatcaaccacccttccaaggccacgacctaccaggacttccctcttgcgcagagcacgacttggtgaagcttcagacagtgaacttgctgatgctgacaaagcatctgttgcttctgaagtatccacaacaagttctacatcaaaacctcccacaggaaggcgtaacatctctcggattgatttattggctcagcctcgtagaacacgacttggctcactgtcagctcgtagtgactctgaagcaacaatttctagaagtagtgcctcttcgaggaccgcagaagccatcattagaagtggagccagactagtaccatcagataaattttctcctagaattagagctaacagtatctctcgactctcagactccaaggtcaaaagtatgacctcagctcatggctctgcttcagtaaattcaagatggaggcgctttcctactgattatgcttccacctcagaagatgaatttggatcaaaccgtaattcccctaaacatacccgtctacgtacttctccagccctgaaaaccactcgcttgcagagcgctggatcagcaatgcctactagttcttcattcaaacaccggattaaagagcaggaagactacatccgagattggactgctcatcgagaagagatagccaggatcagccaagatcttgctctcattgctcgggagatcaacgatgtagcaggagagatagattcagtgacttcatcaggcactgcccctagtaccacagtaagcactgctgccaccacccctggctctgccatagacactagagaagagttggttgatcgtgtttttgatgaaagcctcaacttccgaaagattcctccattagttcattccaaaacaccagaaggaaacaacggtcgatctggtgatccaagacctcaagcagcagagcctcccgatcacttaacaattacaaggcggagaacctggagcagggatgaagtcatgggagataatctgctgctgtcatccgtctttcagttctctaagaagataagacaatctatagataagacagctggaaagatcagaatattatttaaagacaaagatcggaattgggatgacatagaaagcaaattaagagccgaaagtgaagtccctattgtgaaaacctcaagcatggagatttcttctatcttacaggaactgaaaagagtagaaaagcagctgcaagcaatcaatgctatgattgatcctgatggaactttggaggctctgaacaacatgggatttcccagtgctatgttgccatctccaccgaaacagaagtccagccctgtgaataaccaccacagcccgggtcagacaccaacacttggccaaccagaagctagggctcttcatcctgctgctgtttcagccgcagctgaatttgagaatgctgaatctgaggctgatttcagtatacatttcaatagattcaaccccgatggggaagaggaagatgttacagtacaagaatgactttctcttgattgttgaaaaatcattacctgtggaatggctaggaatattggaagcagcatagtgttgatgtacgcaaaacaagacagcttggtcagctacaatcttggaatccctgtcttcttaattttatttatttatttttgacgtataatgtagtatatcaatcctttcaaactatttagataaccacttgatgcacaaataggaaaaagcagattgtggcagtgtcgccttttgtggttttatgattttcaaattgaatttaatgattacaccctttcccttcatagatcttttttcttttttttaagccatgctgtgacctacaagcaaactaaatagccaacatttctgaacccctaagtctcctgtgccaagctgctccctgaaatggacttcttcatctgtacagatttgttaaaccattctatttgcttcttaataataggatttatattagtactcattaccattggacacaatgacataagtactctccacagtaaagcagacctttcacaacagtcactctgtgtcctaaaattttccaacatagatgtgatttatataactttgttgatacgtaaattgtcttggggtttacggaaattaactattatgtttgcactaagatttgctgggagtggtaggtggacatatctatatatcaataaggactaaccgtcttttttgtacataggggattgataatactgtatttgttttaagcccacagtgtttttactccactttcaaaaagtcaatttgggcactttttttcatttttttttaatgggaataagatttggtctctcattttaggttaaatgataactagaaagattaaactagacagatagtttaggtggagtatatttttaaaactcagaacatgtatattggtcctgtgttaccaagtttatatgtgacagttgaaaaagaaattcccttgaaatgatcatgaggttaaaattttcttcattaggggacttggagaaccagtagtcgtaagattagttgatagtttcactcccaagcaatgaattgcttctgtgtgtttccctgtaggactcaatagtaaatgctgtctgtcttacacatttataaggaccctgcaagacgacgacaaaggcctttggcctgtgctactaaacaagaagcctatgaaaaatttcttctttaaacttgttttttctctttccagtaagttcacatttggataattttaaaaagaaaagtaattacctttgtgtttccagaacactataattggggtgtatcttaattcagttaaatattattagtagacctggattttcccccttgaccccatcagtctataaaggttaaactgcaacttttatgaaatggtctttaatatttccacaataatcctgtgctatatttgttttaagaaacaaagtaactctatacacttcaagactttacaggattttttaaatcctgtattgttggatcaattaataaagatgcaaaaaaactttatagagatgtaaaaacaaaactataatggatctcctatttttctttaaatacaaaaaaaaaaaggtaaatgaactattctccttgtaaagctaaattccccattctgtctaataaaggaagactgaaaaaaggttttaaagaacataaatggaaagatacaaatgctttgaaggaataaacgaaatgttaaaacagggtcaatccatttgaagaaaaagttggacaaaataatcagcattgctccctcttttatttaatatttgggtactgattatatccacatggaagtagaaggtaaggagtttaggaaaatactagaatctactctgcttacattcttgtttaagtgtttacacagtttggttcaattataaacatttggccttttactatgttatttttattttgtatgaatacattatcctccttatttatttttgttacatttattacttatgttattttgttatgcatttacaactccatttttaaataaagtgtttctggaacttt

SEQ ID NO: 69 - DNA, 829 bp, Homo sapiens
cctcttttccgtggcgcctcggaggcgttcagctgcttcaagatgaagctgaacatctccttcccagccactggctgccagaaactcattgaagtggacgatgaacgcaaacttcgtactttctatgagaagcgtatggccacagaagttgctgctgacgctctgggtgaagaatggaagggttatgtggtccgaatcagtggtgggaacgacaaacaaggtttccccatgaagcagggtgtcttgacccatggccgtgtccgcctgctactgagtaaggggcattcctgttacagaccaaggagaactggagaaagaaagagaaaatcagttcgtggttgcattgtggatgcaaatctgagcgttctcaacttggttattgtaaaaaaaggagagaaggatattcctggactgactgatactacagtgcctcgccgcctgggccccaaaagagctagcagaatccgcaaacttttcaatctctctaaagaagatgatgtccgccagtatgttgtaagaaagcccttaaataaagaaggtaagaaacctaggaccaaagcacccaagattcagcgtcttgttactccacgtgtcctgcagcacaaacggcggcgtattgctctgaagaagcagcgtaccaagaaaaataaagaagaggctgcagaatatgctaaacttttggccaagagaatgaaggaggctaaggagaagcgccaggaacaaattgcgaagagacgcagactttcctctctgcgagcttctacttctaagtctgaatccagtcagaaataagattttttgagtaacaaataaataagatcagactctg

SEQ ID NO: 70 - DNA, 735 bp, Homo sapiens
ggcttccgtagcgggagggcgaaagatggcggcggcagtactgggacagttgggtgcgttatggatacataacctgaggagccgggggaagctggccttgggtgttttacctcaatcatatatccacacaagtgcttctcttgacatttctcgaaaatgggagaagaagaataaaattgtttatcctccacaactgcctggagaacctcggagaccagcagaaatctaccactgtcgaagacaaataaaatatagcaaagacaagatgtggtatttggcaaaattgatacgaggaatgtctattgaccaggctttggctcagttggaattcaatgacaaaaaaggggccaaaataattaaagaggttctcttagaagcacaagatatggcagtgagagaccataacgtggaattcaggtccaatttatatatagctgagtccacctcaggacgaggccagtgcctgaaacgcatccgctaccatggcagaggtcgctttgggatcatggagaaggtttattgccattattttgtgaagttggtggaagggcccccacctccacctgagccaccaaagacggcagttgcccatgccaaagagtatattcagcagcttcgcagccggaccatcgttcacactctatgatgaggagattcagactccacagtgtatatattttgccatttattttctaaaaataaacaaaaattgaaggcaaaaaaaaaaaaaaaaaa

SEQ ID NO: 71 - DNA, 7585 bp, Homo sapiens
ggtctcgatctcctgaccttgtgatccacctcctcggcctcccaaagtgctgggattacaggcatgagccacggcacccagcctcatttgctgttaaactcatttattgagtcacctttttcttcctcacactttttagtcttagaatttttgtgtgtttttatttaccctaacctgtcaatttcatagtttccactttcttgttgaagtttccaaacttgacctcatgcctttgaatatactaattctattgctttgacacatttttttcccgaaaaaggtgtaaatgggtcaataaatggaagtaatacatcatctgtaattggtatcaacacatctgtactatccactactgcttcaagttccatgggacaaactaaaagtacaagctcaggtggaggaaatcgaaaatgtaatcaggaacaaagcaaaaaccagcctttggatgctagagttgacaaaatcaaagataagaaaccaaggaagaaagcaatggaaagttctagcaacagtgatagtgattcaggcacatcatcagacacctcaagtgaaggcattagtagcagtgattcagatgatctagaagaagatgaagaagaagaagatcaaagtattgaagaaagtgaagatgatgattctgattcagagagtgaagcacaacataaaagtaacaaccaggtgctattacatggtatttcagacccaaaagcagatggacagaaagcaactgaaaaagcccaggaaaaaagaatacaccagccattacctcttgcgtttgaatcccagactcactcattccaatcccagcagaagcagcctcaggttttgtcacagcagcttccatttattttccaaagctctcaggcaaaggaggaatctgtgaacaaacacaccagtgtaatacagtctacgggattggtgtccaatgtgaaacctttatctttggtaaatcaagccaaaaaggaaacttacatgaaactcatagttccttctcctgatgttcttaaagcagggaataaaaatacctctgaagaatctagtttattgaccagtgaattgagatccaaacgggaacaatataaacaggcattcccatcacagttaaagaaacaagagtcatcgaagagcctgaagaaggttattgcagctttgtcaaatccaaaagcaacctctagttcaccagcacatccaaaacaaacattagaaaacaaccacccaaatccattcttgacaaatgcacttttaggtaatcaccaaccaaatggagttattcaaagtgtcattcaagaagctcctctagcacttactaccaaaactaaaatgcagagcaagattaatgaaaacattgctgctgcaagtagcacccctttttcctcacctgtaaatctgagtacaagtgggagaagaacccctggcaatcagacacctgtaatgccttctgcctctcccatcctgcatagtcaagggaaggaaaaagcagttagcaataatgtaaacccagtaaaaacacagcatcactcccatcctgcaaaatctttagtggaacaattcagaggaacagattcagacattcccagtagtaaagattctgaagattcaaatgaggatgaagaggaagatgatgaagaagaagatgaggaagatgatgaagatgatgaatctgatgacagccaatcagaatcagatagtaattcagaatcagatacagaaggatcagaagaagaagatgatgatgataaagaccaagatgaatcagatagtgatactgaaggagagaaaacttcaatgaaactgaataaaacaacttcctctgtcaaaagcccttccatgagtctcacaggtcactcaacacctcgtaacctccacatagcaaaagccccaggctctgctcctgctgccttatgttctgaatcccagtcacctgcttttcttggtacatcttcttccacacttacttcaagcccacactctggcacttccaaaagaagaagagtaacagatgaacgtgaactgcgtattccattggaatatggctggcagagagagacaagaataagaaactttggagggcgccttcaaggagaagtagcatattatgctccatgtggaaagaaacttaggcagtaccctgaagtaataaagtatctcagcagaaatggaataatggatatctcaagggacaatttcagcttcagtgcaaaaataagagtgggtgacttctatgaagccagagatggaccgcaggaaatgcagtggtgtcttttgaaagaagaggatgtcattcctcgtatcagggcaatggaaggtcgtagaggaagaccaccaaatccagatagacaacgagcaagagaggaatccaggatgagacgtcggaaaggtcgacctccaaatgttggcaatgctgaattcctagataacgcagatgcaaagttgctaagaaaactgcaagctcaagaaatagccaggcaagcagcacaaataaagcttttgagaaaacttcaaaagcaggaacaggctcgggttgctaaagaagccaaaaaacaacaagcaataatggctgctgaggagaagcggaagcaaaaagaacagataaagattatgaaacagcaggaaaaaattaagagaatacagcaaatcagaatggaaaaagaacttcgagctcagcaaattctagaggctaaaaagaaaaagaaggaagaagcggcaaatgccaaattattggaggccgagaaacgaataaaggaaaaagaaatgagaagacaacaagctgttcttctgaaacatcaggaacgagagcgaaggcgacaacacatgatgcttatgaaagctatggaagctcgtaaaaaagcagaagaaaaagagcggttgaaacaagaaaaacgtgatgagaaaagattaaataaagagcgtaaactagagcagcgaagattagaattagaaatggcaaaggaactaaagaagcctaatgaagacatgtgcttagcagaccaaaagcctttgccagagttgcctcgtattccaggacttgttctctctggaagtacattttcagactgtctcatggtggtgcagttcttacgaaactttggtaaagttttgggctttgatgtgaatattgatgttccaaacctgagtgttcttcaagagggattgctaaatataggggacagcatgggtgaagtacaagacttgcttgtgaggctcctctcagctgctgtatgtgatccaggtctaataacaggatacaaggctaaaacagctcttggagaacatttgctgaatgttggtgtgaatcgagacaatgtttccgagattttacagatatttatggaagcccactgtggacaaactgagcttactgaaagtctgaagaccaaagcttttcaggctcacactccagcacagaaagcttcagtcctggctttcctgatcaatgaactggcatgcagcaagagtgtggtcagtgaaatcgacaagaacattgattatatgtcaaacttgaggagagataaatgggtggtagaaggtaaactccgcaagctcagaatcattcatgctaagaaaacaggcaaaagagacacttcaggtggcattgatctgggagaagagcagcatcccttgggcacacccactccaggacgcaagcgaagaaggaagggaggagacagtgattatgacgatgatgatgacgatgacagtgatgaccaaggggatgaagatgatgaggatgaagaagataaggaagaccaaaaaggaaaaaagactgatatctgtgaagatgaggatgaaggtgaccaagcagcaagtgttgaagagctggaaaaacagattgaaaaactgagtaaacaacagagtcagtacagaaggaagctctttgatgcgtctcactcattgcgttcagtgatgtttggcccagatcgttacagacgccggtactggattcttccccgatgtggggggatttttgtagaaggcatggagagtggtgaaggactagaagaaattgcaaaagaaagagaaaaactgaaaaaggcagaaagtgtccagatcaaagaagaaatgtttgagacttctggggacagtttaaattgttcaaatacagatcactgtgaacaaaaggaagatcttaaagaaaaagataacacaaatctattccttcagaaacctggctctttttccaaattaagcaagcttttggaagtagctaagatgcctcctgagtcagaggttatgacccccaaaccaaatgctggtgcaaatgggtgcacgttgtcttatcagaacagtggaaaacattcactgggcagcgttcagtcaacagcaacgcaaagcaatgtggaaaaggcagactctaataatctgtttaatactggttcaagtggtccagggaagttctacagtcctctccccaatgaccagttactaaaaacgctgactgaaaagaatagacaatggtttagtcttttgccacgaacaccctgtgatgacacttcacttactcatgccgatatgtcaactgcttctttggtgactcctcagtctcagccaccatctaagtcaccttcacctaccccagctcctcttggatcttctgctcagaatcctgttggcttaaatccatttgctttatcacctcttcaggtgaaaggtggagtatctatgatgggacttcagttttgtggatggcccactggtgtggttacttctaatattccatttacattatctgtacctagtctaggatcggggttagggttatcagaaggaaatggtaattcattcttgacttccaatgttgcttcaagtaaaagtgaatctccagtaccacagaatgaaaaggccacttcagctcaacctgcagctgttgaagtagcaaaaccagtagattttcctagtccaaaacctattccagaagaaatgcagtttggttggtggagaattattgacccagaggacctaaaagctttgctcaaagtgctgcatctcagaggaataagagaaaaggcattacaaaaacaaattcagaaacatttggattatattactcaagcctgcctcaagaataaggatgttgctattattgaactgaatgaaaatgaagaaaaccaagtaactcgagatattgtggagaactggtcagtagaagaacaagcaatggaaatggatttgagtgtccttcaacaggtagaagatctagaaaggagagttgcatccgcaagtttgcaagtgaagggttggatgtgtccagagcctgcatcagaaagggaggacttggtatattttgaacataaatcatttactaaattgtgcaaggagcatgatggagaatttactggcgaagacgaaagcagtgcacatgcactagaacggaagagtgacaaccccctagatatagctgttaccaggctggctgatttggagcggaacattgaaagaagaattgaggaagatattgctccagggctcagggtgtggagaagggcattatcagaagctcgcagtgctgcacaggtagctctgtgcattcagcaattacagaaatcaatagcatgggaaaaatcaattatgaaagtttactgccaaatctgtcgaaagggagataatgaagaactgcttcttctttgtgatggctgtgacaaaggctgtcatacctactgccatagacccaagattacaacaatcccagatggagactggttttgtccagcttgcattgctaaggcaagtggtcaaactctaaaaatcaaaaaacttcatgtcaaaggaaaaaagactaatgagtctaagaaaggcaagaaggtaactttaacaggagatactgaagatgaagactctgcatctacaagtagttcactaaaaagaggaaacaaagacctccagaaaagaaaaatggaggaaaacacttctattaacttgtcaaaacaagaaagttttacttcagttaagaaacctaaaagagatgactccaaggacctagctctttgcagtatgattctgactgaaatggaaactcatgaggatgcatggccttttctacttcctgtaaacttgaaacttgttcctggttataagaaagttattaagaagcctatggatttttccacaattagagagaaactaagtagtggacagtatccaaaccttgaaacctttgctctagatgtcaggcttgtttttgacaactgtgaaacatttaatgaagatgattctgatataggcagagctggccacaatatgaggaagtattttgaaaaaaagtggacagatactttcaaagtgagctgaagttataataatctctttatttttttccttctaaacaaggacaaatgagaccagcaatgtgaactgtatttacataaacgtgcaaggcacatacataatgactttctttttccttaagtataaaaaaaaagtatcagaagaatgataccatttttaaaggcttcattcctacaacaaccaaggccctcggttattggtttgtgtgatttatcagctaatttaggtagaacagggaagcacacccaaagaattttcaaaggaaagggtgttatagtgcaatagcaattaaaatatatcaaatcgcactgaatactcaacaccagagctctaatgtgggaaatggttctcctttccctctcaataaatatctatttttcatttttttactttgtagtttattttttagtgaatgtatttaattttatgaattatttatgattaaaccacatccagaatcttcgttttctgtgaaaaggaagaactagaaaattgctttaaatcttgaaaatacaaggaatgttttaaaatataaaacaaagccaagttaaactgtttacactgatgtgctataaaagcaccaaaaagaaactttactgtagagttacaagtacatttatatatatatgttgctgcatcacttgtgtagttaaattgtatttcaaaacagtgaaaaaattgacatgtatatactgttcattcttgtttatattaagtcttgttttaaatatgtattatgtgtatatattgtttgcagacattattgttcatgccttagaggattgtagcattttattttcgtctgaaggtaatgatagctatacagtctgtacagtaattatcctctaccaacactgtggcgtctccttaatcttggtagtgcctgcctttgaaacagggtgtaggggatattagttttccatttttctattttgttatataattttaagccaccagggcctaaattaaagtataatcatttgtatccatgtggaataaaattgtgacaatttcctacgcacacagtattttttcatagaaacatttccctcccatttgccttgcctcagaaataaatttaaaagacgtttgtaaccactgtgttttatctactgtgtgttgtggtggcctgttggaggcaaatagatcagattttttttgtacctacgtaagagtacttgaagttttatttaaaataaaatgttgtggaaaaggtagcattctttttttaggagtgttatttttcactatgtgtggcacggatacaataaaagacttttacaaactaaaaaaaaaaaaaaaa

SEQ ID NO: 72 - DNA, 2600 bp, Homo sapiens
ggttaggaagagtggagactgctgcacggactctggaaccatgaacatatttgatcgaaagatcaactttgatgcgcttttaaaattttctcatataaccccgtcaacgcagcagcacctgaagaaggtctatgcaagttttgccctttgtatgtttgtggcggctgcaggggcctatgtccatatggtcactcatttcattcaggctggcctgctgtctgccttgggctccctgatattgatgatttggctgatggcaacacctcatagccatgaaactgaacagaaaagactgggacttcttgctggatttgcattccttacaggagttggcctgggccctgccctggagttttgtattgctgtcaaccccagcatccttcccactgctttcatgggcacagcaatgatctttacctgcttcaccctcagtgcactctatgccaggcgccgtagctacctctttctgggaggtatcttgatgtcagccctgagcttgttgcttttgtcttccctggggaatgttttctttggatccatttggcctttccaggcaaacctgtatgtgggactggtggtcatgtgtggcttcgtccttgttgatactcaactcattattgaaaaggccgaacatggagatcaagattatatctggcactgcattgatctcttcttagatttcattactgtcttcagaaaactcatgatgatcctggccatgaatgaaaaggataagaagaaagagaagaaatgaagtgaccatccagcctttcccaattagacttcctctccttccacccctcatttcctttttgcacacattacaggtggtgtgttctgtgataatgaaaagcatcagaaaagcttttgtactttgtggtttcctctattttgaattttttgatcaaaaaactgattagcagaatatagtttggagtttggcttcatcttcctggggttcccctcactcccttttttgtcaaccccatctgtagcctcttcctctactcaggcagtcgacccgccacgatgagaagtgggaccagccagagggcgccaacttcaggagtccgctttcccaccaggcttcattcacccagtggacctgaactgtttggtagagccacccggcccttccttcctcattgttgtttggtatgcgcacagttcctgtgggactgggccgtgagttttccattggaaagaagttcagtggtcccattgttaactcagcctcaaatctcaactgtcaggccctacaaagaaaatggagagcctcttctggtggatgctttgctccctctgagctgcccatgctggtctggcaaacacacctttctgctttgccttcacaaaagtaatgtgttccctttcccgccccttgcctgaccctcagggagtcagcctgcttccatccatgggtgggaagacttcagcacaaaggaaagactaattcttgtcaggcatttttgaaaaggctgattatgtgtatcaaggtacagctacgtaggttcccctaaacttgccctgtttttgtttttttagtttgttatccccttactgagcggcctctactaggtggctgtgattaaatgtcccaagcaaggatagggaaggggaatggttgagcctctggagatcattgtaaccaatcctgccagacctgtttggggcagtggggagcaaacctagataaggacctgtttggggcagcagggagcaaaatctcctttaacaaccaagcagttcctcattcacatcaacagagcgaggctgtgataacttaggaggcagcaatcctaatagtccttcagtgcattttagtctgtctccaactggacaccagtaggtagtgtcaagccagagattcggggcagtagataaatgttcattttactgatgcactttagtttttggtctgttacctgttttccagaaatttgtggccttttaggcgggagttaggcgaccaaaccagtgagagccccaatccctgcagttttgtggcttcaagtgtgggtggacagtcctaatggggatctccagctccttcctgtgggctgccacagacagctacccccagaagggtcaatgttgggagtggttgtggctctgagctgctctacagagcttcagtgtgagaggatcgagccattgaaagctcattaccagtaggacataatttttggctctccctattcacaaccagtgcacagtttgacagtggcctcaggttcacagtgcaccatgtcactgtgctatcctacgaaatcatttgtttctaagttgtgtttattcctggagtgacatgccaccccgaatggctcactttcactgaggatgctgtcctctgatttagctgctgcctccagcctctggcttgagaacttactaaaggcacttccttcctgttaaacccctgttaactctccataaatttggtgattctctgctaggcctaagattttgagttaacatctcttgaagccaaactccaccttctgtgctttttgcttgggataatggagtttttctttagaaacagtgccaagaatgacaagatattaaaaaaaaaaaaaaaaaaaaaaaaaaaaaaaaaa

SEQ ID NO: 73 - DNA, 1892 bp, Homo sapiens
ggcacgagctcagctggcagttaccaccgtgttagaaagcagcctcaggaccggccacctccatcactggcgtcaccatgggggctgtgctgggtgtcttctccctcgccagctgggttccatgcctctgcagcggtgcctcatgtttgctgtgtagttgctgtcctaacagtaagaattccacggtgactcgcctcatttatgctttcattctcctcctgagcactgtcgtatcctatatcatgcagagaaaagagatggaaacttacttgaagaagattcctggattttgtgaagggggatttaaaatccatgaggctgatataaatgcagataaagattgtgatgtgctggttggttataaagctgtgtatcggatcagctttgccatggccatctttttctttgtcttttctctgctcatgttcaaagtaaaaacaagtaaagatctccgagcggcagtacacaatgggttttggttcttcaaaattgctgcccttattggaatcatggttggctctttctacatccctgggggctatttcagctcagtctggtttgttgttggcatgataggggccgccctcttcatcctcattcagctggtgctgctggtagattttgctcattcttggaatgaatcatgggtaaatcgaatggaagaaggaaacccaaggttgtggtatgctgctttactgtctttcacaagcgccttttatatcctgtcaatcatctgtgtcgggctgctctatacatattacaccaaaccagatggctgcacagaaaacaagttcttcatcagtattaacctgatcctttgcgttgtggcttctattatatcgatccacccaaaaattcaggaacaccagcctcgctccggcctcttgcagtcctccctcatcaccctctacactatgtacctcacctggtcagccatgtccaatgaacctgatcgttcctgcaatcccaacctgatgagctttattacacgcataactgcaccaaccctggctcctggaaattcaactgctgtggtccctacccctactccaccatcaaagagtgggtctttactggattcagataattttattggactgtttgtctttgttctctgcctcttgtattctagcatccgcacttccactaatagccaagtagacaagctgaccctgtcagggagtgacagcgtcatccttggtgatacaactaccagtggtgccagtgatgaagaagatggacagcctcggcgggctgtggacaacgagaaagagggagtgcagtatagctactccttattccacctcatgctctgcttggcttccttgtacatcatgatgaccctgaccagctggtacagccctgatgcaaagtttcagagcatgaccagcaagtggccagctgtgtgggtcaagatcagctccagctgggtctgcctcctgctttacgtctggacccttgtggctccacttgtcctcaccagtcgggacttcagctgaacctctgagtgccaaggacaccactggaactcacaaaggtctccttcaccgaaaacccatataccttttaagtttgtttcaactaaaatattaagtgaatgctttgcaagtttgactgtatgcaggtttatatcagaaggtgagattgaataatgcttgatgcagaatcgaaacttctcatttatctgtatattatgtttacttctaaggatatagcacaaagggaacattttttgtttaaagtgaactacagctgtgctgtgaagagagttctttataaagcctgtaggttcttttaactttggtttaaaatgtaagataggaaaatgttggatatttgaggccatgcttaatatatttatattgcagtatcctttaaaagcaaaaaaaaaa

SEQ ID NO: 74 - DNA, 1750 bp, Homo sapiens
ggcacgaggcttcgtaaagatggccgcggaggcttttggagccaactgggagcgcagtacgcgttttctggagcatgggcagaggagacaggaacaagcgtagcatccgtgagcaccgattggctgaagcgagcaccccgggagctgactggctccgccattcgcgggaaggcgtttgtggtgccagagaaaagtagccagagcggcgcagtggcggccgcgttctgtggttttccgctattcccccagacccgcaccttctcggcctctttgcggagaatcgtgaccaagatgtggaacagtggattcgaaagctatggcagctcctcatacgggggagccggcggctacacgcagtccccggggggctttggatcgcccgcaccttctcaagccgaaaagaaatcaagagcccgagcccagcacattgtgccctgtactatatctcagctgctttctgccactttggttgatgaagtgttcagaattgggaatgttgagatttcacaggtcactattgtggggatcatcagacatgcagagaaggctccaaccaacattgtttacaaaatagatgacatgacagctgcacccatggacgttcgccagtgggttgacacagatgacaccagcagtgaaaacactgtggttcctccagaaacatatgtgaaagtggcaggccacctgagatcttttcagaacaaaaagagcctggtagcctttaagatcatgcccctggaggatatgaatgagttcaccacacatattctggaagtgatcaatgcacacatggtactaagcaaagccaacagccagccctcagcagggagagcacctatcagcaatccaggaatgagtgaagcagggaactttggtgggaatagcttcatgccagcaaatggcctcactgtggcccaaaaccaggtgttgaatttgattaaggcttgtccaagacctgaagggttgaactttcaggatctcaagaaccagctgaaacacatgtctgtatcctcaatcaagcaagctgtggattttctgagcaatgaggggcacatctattctactgtggatgatgaccattttaaatccacagatgcagaataactggatctaactgggtacctgagatattttacagctggacctagtttcacaatctgttgtctccagctctgcatatgtctggccagggggcttctaggaagtaggtttcatctatcaaatgtctcctctgacttccttttgaaacttactgctcttctgttttattttgttttgtttgaagctcagagggagatgggcaattgacagggatgcaatccagggtgggatttcttgaggaagttacaaataagcttgttacaacatcaagatagatggaattggaaggatgctaccaggagagtacttacatagtgctcaggagtttctcttcttaaaatgtttactgctgaaagatgagcaggaccagggcgttataggcagagccctagccgagaaacctgctggcctctgcctgttttcatttcccactttggttgtgtggcattactttcagaattgcactttcctgcttgtcatgactttttgacacacttgccatgacgtgtgtttctgtgaacatgaagttctgcggtagtgcctccaggggcagaggaaaagaagaagtgttactgcgttttgtacaaaataaatacagtcatatgtttaataaaacagttctattgtaaaaaaaaaaaaaaaaaaaaaa

SEQ ID NO: 75 - DNA, 2848 bp, Homo sapiens
ccttctccccggcggttagtgctgagagtgcggagtgtgtgctccgggctcggaacacacatttattattaaaaaatccaaaaaaaatctaaaaaaatcttttaaaaaaccccaaaaaaatttacaaaaaatccgcgtctcccccgccggagacttttattttttttcttcctcttttataaaataacccggtgaagcagccgagaccgacccgcccgcccgcggccccgcagcagctccaagaaggaaccaagagaccgaggccttcccgctgcccggacccgacaccgccaccctcgctccccgccggcagccggcagccagcggcagtggatcgaccccgttctgcggccgttgagtagttttcaattccggttgatttttgtccctctgcgcttgctccccgctcccctccccccggctccggcccccagccccggcactcgctctcctcctctcacggaaaggtcgcggcctgtgccctgcgggcagccgtgccgagatgaaccccagtgcccccagctaccccatggcctcgctctacgtgggggacctccaccccgacgtgaccgaggcgatgctctacgagaagttcagcccggccgggcccatcctctccatccgggtctgcagggacatgatcacccgccgctccttgggctacgcgtatgtgaacttccagcagccggcggacgcggagcgtgctttggacaccatgaattttgatgttataaagggcaagccagtacgcatcatgtggtctcagcgtgatccatcacttcgcaaaagtggagtaggcaacatattcattaaaaatctggacaaatccattgataataaagcactgtatgatacattttctgcttttggtaacatcctttcatgtaaggtggtttgtgatgaaaatggttccaagggctacggatttgtacactttgagacgcaggaagcagctgaaagagctattgaaaaaatgaatggaatgctcctaaatgatcgcaaagtatttgttggacgatttaagtctcgtaaagaacgagaagctgaacttggagctagggcaaaagaattcaccaatgtttacatcaagaattttggagaagacatggatgatgagcgccttaaggatctctttgggcctgccttaagtgtgaaagtaatgactgatgaaagtggaaaatccaaaggatttggatttgtaagctttgaaaggcatgaagatgcacagaaagctgtggatgagatgaacggaaaggagctcaatggaaaacaaatttatgttggtcgagctcagaaaaaggtggaacggcagacggaacttaagcgcaaatttgaacagatgaaacaagataggatcaccagataccagggtgttaatctttatgtgaaaaatcttgatgatggtattgatgatgaacgtctccggaaagagttttctccatttggtacaatcactagtgcaaaggttatgatggagggtggtcgcagcaaagggtttggttttgtatgtttctcctccccagaagaagccactaaagcagttacagaaatgaacggtagaattgtggccacaaagccattgtatgtagctttagctcagcgcaaagaagagcgccaggctcacctcactaaccagtatatgcagagaatggcaagtgtacgagctgttcccaaccctgtaatcaacccctaccagccagcacctccttcaggttacttcatggcagctatcccacagactcagaaccgtgctgcatactatcctcctagccaagttgctcaactaagaccaagtcctcgctggactgctcagggtgccagacctcatccattccaaaatatgcccggtgctatccgcccagctgctcctagaccaccatttagtactatgagaccagcttcttcacaggttccacgagtcatgtcaacacagcgtgttgctaacacatcaacacagacaatgggtccacgtcctgcagctgcagccgctgcagctactcctgctgtccgcaccgttccacagtataaatatgctgcaggagttcgcaatcctcagcaacatcttaatgcacagccacaagttacaatgcaacagcctgctgttcatgtacaaggtcaggaacctttgactgcttccatgttggcatctgcccctcctcaagagcaaaagcaaatgttgggtgaacggctgtttcctcttattcaagccatgcaccctactcttgctggtaaaatcactggcatgttgttggagattgataattcagaacttcttcatatgctcgagtctccagagtcactccgttctaaggttgatgaagctgtagctgtactacaagcccaccaagctaaagaggctgcccagaaagcagttaacagtgccaccggtgttccaactgtttaaaattgatcagggaccatgaaaagaaacttgtgcttcaccgaagaaaaatatctaaacatcgaaaaacttaaatattatggaaaaaaaacattgcaaaatataaaataaataaaaaaaggaaaggaaactttgaaccttatgtaccgagcaaatgccaggtctagcaaacataatgctagtcctagattacttattgatttaaaaacaaaaaaacacaaaaaatagtaaaatataaaaacaaattaatgttttatagaccctgggaaaaagaattttcagcaaagtacaaaaatttaaagcattcctttctttaattttgtaattctttactgtggaatagctcagaatgtcagttctgttttaagtaacagaattgataactgagcaaggaaacgtaatttggattataaaattcttgctttaataaaaattccttaaacagtg

SEQ ID NO: 76 - DNA, 529 bp, Homo sapiens
cgctctcctttcgttgcctgatcgccgccatcatgggtcgcatgcatgctcccgggaagggcctgtcccagtcggctttaccctatcgacgcagcgtccccacttggttgaagttgacatctgacgacgtgaaggagcagatttacaaactggccaagaagggccttactccttcacagatcggtgtaatcctgagagattcacatggtgttgcacaagtacgttttgtgacaggcaataaaattttaagaattcttaagtctaagggacttgctcctgatcttcctgaagatctctaccatttaattaagaaagcagttgctgttcgaaagcatcttgagaggaacagaaaggataaggatgctaaattccgtctgattctaatagagagccggattcaccgtttggctcgatattataagaccaagcgagtcctccctcccaattggaaatatgaatcatctacagcctctgccctggtcgcataaatttgtctgtgtactcaagcaataaaatgattgtttaacta

SEQ ID NO: 77 - DNA, 2019 bp, Homo sapiens
acgtgtatcgctgccgtcaagatggaggggcctttgtccgtgttcggtgaccgcagcactggggaaacgatccgctcccaaaacgttatggctgcagcttcgattgccaatattgtaaaaagttctcttggtccagttggcttggataaaatgttggtggatgatattggtgatgtaaccattactaacgatggtgcaaccatcctgaagttactggaggtagaacatcctgcagctaaagttctttgtgagctggctgatctgcaagacaaagaagttggagatggaactacttcagtggttattattgcagcagaactcctaaaaaatgcagatgaattagtcaaacagaaaattcatcccacatcagttattagtggctatcgacttgcttgcaaggaagcagtgcgttatatcaatgaaaacctaattgttaacacagatgaactgggaagagattgcctgattaatgctgctaagacatccatgtcttccaaaatcattgggataaatggtgatttctttgctaacatggtagtagatgctgtacttgctattaaatacacagacataagaggccagccacgctatccagtcaactctgttaatattttgaaagcccatgggagaagtcaaatggagagtatgctcatcagtggctatgcactcaactgtgtggtgggatcccagggcatgcccaagagaatcgtaaatgcaaaaattgcttgccttgacttcagcctgcaaaaaacaaaaatgaagcttggtgtacaggtggtcattacagaccctgaaaaactggaccaaattagacagagagaatcagatatcaccaaggagagaattcagaagatcctggcaactggtgccaatgttattctaaccactggtggaattgatgatatgtgtctgaagtattttgtggaggctggtgctatggcagttagaagagttttaaaaagggaccttaaacgcattgccaaagcttctggagcaactattctgtcaaccctggccaatttggaaggtgaagaaacttttgaagctgcaatgttgggacaggcagaagaagtggtacaggagagaatttgtgatgatgagctgatcttaatcaaaaatactaaggctcgtacgtctgcatcgattatcttacgtggggcaaatgatttcatgtgtgatgagatggagcgctctttacatgatgcactttgtgtagtgaagagagttttggagtcaaaatctgtggttcccggtgggggtgctgtagaagcagccctttccatataccttgaaaactatgcaaccagcatggggtctcgggaacagcttgcgattgcagagtttgcaagatcacttcttgttattcccaatacactagcagttaatgctgcccaggactccacagatctggttgcaaaattaagagcttttcataatgaggcccaggttaacccagaacgtaaaaatctaaaatggattggtcttgatttgagcaatggtaaacctcgagacaacaaacaagcaggggtgtttgaaccaaccatagttaaagttaagagtttgaaatttgcaacagaagctgcaatcaccattcttcgaattgatgatcttattaaattacatccagaaatccttcggattaaacatggaagttatgaagatgctgttcactctggagcccttaatgattgatctgatgttccttttatttataacaatgttaaatgcaatgtcttgtaccttgagttgagtattacacattaaagtaaagtacaagctgtaaacttgggtttttgtgatgtaggaaatggtttccatctgtactttggtcctctgatttcagatattgcaacctagtactttattagtttaaaaagaaattgaggttgttcaaagtttaagcaattcattctctctgaacacacattgctattcccatcccacccccaatgcacagggctgcaacaccacgacttctgcccattctctccagtgtgtgtaacagggtcacaagaattc

SEQ ID NO: 78 - DNA, 1620 bp, Homo sapiens
gaattccgggtttgaaaaggagttctagggaagaagagagttagttagcacatcaatgggagcagggctcttaccccacgtggtgttacatatatattattttcatacatggtttctggctcataagttccttagcccttgctatagtcttttgtgttcggtcttaagggcaggactgtactcttccctcacctttctaattgtgcatcttaagaccttccccagagagggtggtgccctgtagttgtgggaaggaatgctggcatcatgaagcttccataaaaacccgagaaacgagcttctggatagctggacacatggaggtcctggagggtggagcccagggaggcatggaagctccacagcccttcccccataccttaccctatttcctctgtatcctttgtaatatcctttatgataaaccagcaaatgtgtgtaaatgtttccctaaggtctgtggccactccagcaaattaattgaacctaaagagggggtcgtgggaaccccaacttgaagccagtcagtcagaagttctggatgtccagacttcagactggtgtctgaaagggtggaggcagtcttggggaccgagcccccaatctatgggatctgacactatctccagtagtgttggaattgagtcaccagcgtgtccactggttagtgtgtgagaaactccctaccattggtcacagaagtcttcttctgtgttgatagttgtagtgtgacagcagaggaaaaacaaagtcagaaagagttttcccgaacacacccaatttctccattttactatccatttccacaaacactgactacaatagaagtataaaaattactccactgcatcattcagctttccatctctctcagacaccaagctgcagatccaggtcactttgtaggtcaccacctagaggggaggaagacctcgctttggagagtgggaataaaacgctcgtggaaaagggtacacgcttttctgggaaagtgaggccaccatggctctggagaagtctcttgtccggctccttctgcttgtcctgatactgctggtgctgggctgggtccagccttccctgggcaaggaatcccgggccaagaaattccagcggcagcatatggactcagacagttcccccagcagcagctccacctactgtaaccaaatgatgaggcgccggaatatgacacaggggcggtgcaaaccagtgaacacctttgtgcacgagcccctggtagatgtccagaatgtctgtttccaggaaaaggtcacctgcaagaacgggcagggcaactgctacaagagcaactccagcatgcacatcacagactgccgcctgacaaacggctccaggtaccccaactgtgcataccggaccagcccgaaggagagacacatcattgtggcctgtgaagggagcccatatgtgccagtccactttgatgcttctgtggaggactctacctaaggtcagagcagcgagataccccacctccctcaacctcatcctctccacagctgcctcttccctcttccttccctgctgtgaaagaagtaactacagttagggctcctattcaacacacacatgcttccctttcctgagccggaattc

SEQ ID NO: 79 - DNA, 2056 bp, Homo sapiens
gagaggcgcccaggcggcggcggcggcggcccagcttcttctttcctcgcacagccaggcggcccctgctcgagtcccgcgtcgccatggccgcggttcccgagttgctgcagcagcaggaggaggaccgcagcaagctgagatctgtatctgtggacctgaatgttgatccctcgcttcagattgacatacctgatgcgctcagtgagagagacaaagtcaaatttacagtgcacacaaagaccacactgcccacgtttcagagcccagagttttctgttacaaggcaacatgaagactttgtgtggctacatgacactcttattgaaacaacagactatgctgggcttattattccacctgctcctacgaagcccgactttgatggtcctcgagagaagatgcagaaactgggagaaggtgaagggtctatgaccaaagaagaatttgccaagatgaaacaagaactggaagctgagtatctcgctgtgtttaagaagactgtgtcctcccatgaagtctttcttcagcggctttcttctcaccctgttctcagtaaagatcgcaactttcatgttttcctggaatatgatcaggatctaagtgttaggcggaaaaatactaaagagatgtttggtggcttcttcaaaagtgtggtgaaaagtgctgatgaagtcctttttactggagttaaggaggtagatgacttctttgagcaagagaagaacttccttattaactattacaataggatcaaagattcttgtgtgaaagctgacaaaatgaccagatctcataaaaatgttgccgatgactatatccacaccgcagcctgcttacatagcctggctttagaagagcccacagtcatcaaaaagtacctattgaaggttgctgagctatttgaaaaactaaggaaagtagagggtcgagtttcatcagatgaagatttgaagctaacagagctcctccgatactacatgctcaacattgaagctgctaaggatctcttatacagacgcaccaaagccctcattgactatgagaactcaaacaaagctctggataaggcccggttaaagagcaaagacgtcaagttggctgaggcacaccagcaggagtgctgccagaaatttgaacaactttccgaatctgcaaaagaagaactgataaatttcaaacggaagagagtggcagcatttagaaagaatctaattgaaatgtctgaactggaaataaaacatgccaggaacaatgtctcccttttgcagagctgtattgacttgttcaagaataactgatatgccttcactcagaagaaaagaaatgaatgtgaaagaaagccaagcatcacttgcacttaaatcattaccacggaagatatattagcttcaactttagtttaaaattatgtgaataaatattttgatttctacaaatcttaacatttaaccatgttggtttaaaaatattattgcttgctacttggacataactaatttttccttgtgcatttaatacctctgggcagaatccaaatactgggttctcccgtagttcgtctttagttactaagaaagggtgtaggacacattagccttctggaaacaagtagaagccatcacctggcccatgtccctacaaacccatgattgtcagggaggtgccagttacagcaggtgattcagctacttgaggtcggtaacagaccttccattcctcactgaaggtggggtttgtgtttttgttttgccctgttactccactggtagtcatctggtgtttgtactataacaacagcaagaaaatctcatttatctttatatactctttgcacctcctttttttagtcgagatataaatatttgaggggagagaaatatctacaggtatatatggaaacaaataatgtggtctgctttataagatggccagatctacattaggaaaagtataagccccctccctaatggccgctggggggtgagggcggtgtgttgtatgtctttgggtgtttgtttttttataaagcatataataaaataatcgtgctact

SEQ ID NO: 80 - DNA, 6570 bp, Homo sapiens
gcatgcgtgcagctctttggaggcggtagctttttcggcgtcgagactggaggctgagtgctaaactgtgtggggcgcggatgggatccagctgttagtcgggtaggcatagctttgtgttattcttggaaaatttcgcaccacttgtgaattccttgaacctgggcattgcaaacccacttctgttgggcccatctcctttgcactttgctcagattaagactcagttggcgcttcagcagctgaatgccgttgcctcacatggttcaacaccaccttatactttattaaatcaggctttcttgaaaatagccatgtcgagacccaggtttaatcctcgaggagactttccacttcaaaggccacgagcacctaacccttctgggatgaggcctccaggaccatttatgaggcctggatctatgggtctcccaagattttacccagcagggagagcacgtggaattccacacagatttgctggccatgaatcttatcagaacatggggccacagagaatgaatgttcaggtaactcaacacagaactgatccaagattgaccaaagaaaaactggattttcatgaagcacaacagaagaaggggaagcctcatggtagccggtgggatgatgagcctcatatatctgcatcagtggcagtgaaacagagttctgtaacacaggttacagagcagagtcccaaagtacagagccgctatacaaaagagagtgcctcaagtatcttagcaagttttggattatctaatgaagacctagaagaacttagtcgctatcctgatgaacaactaactcctgaaaatatgccattaattttgagggatataagaatgcgaaaaatggggcgccgattacctaatttaccttctcagagcagaaataaagaaacacttggtagtgaagcagtttcaagtaatgtgatcgattatgggcatgcaagcaaatatggctacacagaagatccacttgaagtacgtatttatgatcctgaaattccaactgatgaggtcgagaatgaatttcagtcacagcagaacatttctgcatctgttcccaatccaaatgtgatatgtaattctatgtttcctgttgaagacgtatttcgccaaatggacttccccggtgagtcctccaataatcggtcctttttctcagttgagagtggaaccaagatgtcaggcttacacatttcaggaggacagtcagtccttgaacccataaaatccgtcaaccaatccattaaccaaacagttagccagacaatgagtcaatctctgattcctccatctatgaaccagcaacctttttcgtcggaattaatttcatctgtaagccagcaagagcggatcccacatgaacctgtgattaattcatctaacgtacatgttggatcaagaggaagtaaaaagaattaccagtcacaggctgacattcccattcggtctccctttggtattgtgaaagcatcctggctaccaaagttttcacatgctgatgcccagaagatgaagagacttccaactccttctatgatgaatgattattatgcagcatctccaagaatatttccacatttgtgttctctgtgtaacgtagaatgtagtcatttgaaggattggattcagcatcaaaatacatctactcatattgagagctgtcgacagttacgtcaacagtatcctgattggaatcctgagatcctcccatcgagaagaaatgagggcaatagaaaagaaaatgaaactccacgaagacgttctcattcccccagtcctaggcgttctagaagatcaagctcaagtcacagattccgtcggtctcgaagcccaatgcattacatgtataggccgagaagtcgaagtccaagaatttgccatcgtttcatttctagatacagatccagatccagatcccgttcaccatatcgaattagaaatccatttagaggtagtccaaaatgctttcgatcagttagccctgagaggatgtcaaggagatcagtgagatcatcagatagaaaaaaagcattagaagatgtagtacaacgatctgggcatgggacagaatttaataaacagaagcatcttgaagctgctgataagggacattcaccagcacaaaagcctaaaactagcagtggaacaaaaccatcagttaaacctacaagcgctacaaagagtgattcaaatctaggaggacattctattcgttgtaaatcaaagaatcttgaagatgacactttgtcagaatgtaaacaggtgtctgataaagctgtttctctccagcgaaagcttcggaaagaacagtcattgcattatggttcggttcttcttataactgaattaccagaggatggttgtactgaagaagatgtgagaaaattatttcaaccatttgggaaagtgaatgatgtcctaattgttccatatagaaaagaggcttacctagaaatggaatttaaagaggcaattactgcaattatgaagtacattgaaacaacacctcttacgataaaaggaaaaagtgtgaaaatatgtgttccaggaaagaaaaaagcacagaacaaagaggtgaagaaaaagactttagagtcaaagaaagtatctgcatctaccttaaaaagagatgcagatgcttcaaaagctgttgaaattgttacttcaacttctgctgccaaaactggacaagccaaggcatctgtagccaaagtaaacaaatctacagggaaatcagcaagttctgtaaaatctgtggtaacggtagctgttaaaggtaataaagcttcaatcaaaacagcaaaatctggtggaaagaagtctctagaagccaaaaagactgggaatgtcaaaaacaaagactctaacaaacctgtgactataccagaaaactctgaaataaagaccagtattgaagtcaaagccactgaaaactgtgctaaagaagctatttctgatgctgctttggaggccacagagaatgaaccacttaacaaggaaacagaagaaatgtgtgtgatgcttgtctctaatttgcctaataaaggatattctgtagaagaagtttatgacttagcaaaaccatttggtggtttaaaggatatcttgattttatcatctcataaaaaggcatatatagaaataaatagaaaagctgctgagtctatggtaaaattttatacctgcttcccagtattgatggatggaaatcaactctcaataagtatggctcctgaaaacatgaatataaaagatgaggaagctatatttataaccttggtaaaagaaaatgacccagaggcaaacatagatacaatttatgatcgatttgtacatcttgataatttaccggaagatggacttcagtgtgtactttgtgttggacttcagtttggaaaagtggatcaccatgtattcataagtaatagaaacaaggcaattcttcagttagatagtcctgaatctgctcagtcaatgtatagctttctgaaacaaaatccacaaaatattggtgaccatatgttgacctgctcattatctccaaagatagacttaccagaggtgcaaattgagcatgacccagaattagaaaaagaaagccctggcttgaaaaacagtccaattgatgaaagtgaggtgcaaacagcaactgatagtccctctgttaaacctaatgagcttgaagaagaaagtactcccagcattcaaacagaaactttggtacagcaggaagagccttgtgaggaagaagctgaaaaagcaacatgtgattctgactttgctgttgaaactttggagcttgaaactcaaggagaggaggtcaaagaagaaattcctcttgtagcatccgcttcagtcagtattgaacaattcactgaaaatgccgaggagtgtgctttaaatcagcagatgtttaacagtgacttggagaagaaaggggcagaaattattaaccctaaaacagcattgttaccatctgacagtgtgtttgcagaagaaaggaacctcaaaggaattctagaagaatctccatctgaagcagaagatttcatttctggaattacacagactatggtagaagctgtagctgaagtagaaaaaaatgaaactgtttcggaaatattgccatcaacttgtattgtgacgttagtaccaggaattcccactggggatgagaagacagtggacaaaaagaatatttctgaaaaaaaaggtaacatggatgaaaaggaggagaaggaatttaatactaaggaaaccagaatggatcttcaaataggaacagagaaggctgaaaagaatgaaggtaggatggatgcagaaaaggtggaaaagatggcagcaatgaaagaaaagcctgcagaaaacactttattcaaggcatacccaaataaaggagtgggtcaggctaataagcctgatgaaactagtaaaactagtattctggctgtatcagatgtatctagcagtaaaccaagcatcaaggctgttatagtctcttctcctaaggcaaaagctacagtttcaaaaactgaaaatcagaaaagttttccaaaatctgtgcccagagatcaaataaatgctgaaaagaaactttcagccaaggaatttggtctgcttaaacccacaagtgccaggtcaggcttggcagaaagcagcagtaaattcaaacctactcagagcagtcttaccagaggaggcagtggaaggatctcagccctgcaaggcaagctttctaaactggattacagagatataacaaaacaatctcaggaaacagaggctagaccttccatcatgaaacgggatgacagcaacaataagactttggctgagcaaaacactaagaatcctaaaagcactactggtagaagttccaaatctaaagaggagccattatttccatttaatttggatgaatttgttactgtggatgaggttatagaagaagtgaatccttctcaggccaagcagaatccactaaagggaaaaaggaaagaaactctcaaaaatgttcctttctctgaacttaacttaaagaagaaaaaggggaaaacttccactcctcgtggtgttgagggagaactatcttttgtgacattggatgagattggggaagaggaagatgcagctgcacatctagcacaagctctagtcactgtggatgaagtaattgatgaagaagaactaaatatggaagaaatggtaaaaaattcaaattcactttttacattagatgaattaattgaccaagatgattgcatttcccacagtgaacctaaagatgttactgttctgtcagtggctgaagaacaagatctcctcaaacaggaacgcttggtaactgtggatgaaattggagaagtggaagagctacctttgaatgagtcagcagacataacttttgccactttaaatactaaaggaaatgaaggagatactgtaagggattccattggcttcatttcttctcaggtgcccgaagacccttctactttagttactgtagatgaaatacaagatgacagcagtgatttgcatttagtgactttggatgaagtaactgaagaggatgaagactctctggcggattttaacaaccttaaagaagagcttaattttgttactgttgatgaagttggagaggaggaagatggagataatgatttaaaagttgagttagcacaaagcaaaaatgaccatcccacagataaaaaagggaatagaaagaagagagctgtggacacaaaaaagacaaaacttgaatccttgtcccaagtgggtccagtaaatgagaatgttatggaagaagatctaaaaaccatgattgaaagacacttaacagctaaaactccaaccaagagagttagaattgggaaaactctgccatcagaaaaagctgttgtgacagaaccagcaaaaggtgaagaggccttccagatgagtgaagttgatgaggaatctggattaaaggattcagaaccagagcgaaaacgcaagaagactgaagactcttcttcaggcaaatcagtggcgtctgatgtccctgaggaattagactttcttgtacctaaggctggattcttctgtccaatttgttccctcttctactcaggtgaaaaagcaatgacaaatcactgcaagagtacacgtcataagcaaaatactgagaaattcatggccaagcaaagaaaggaaaaggagcagaatgaggctgaagaaagaagctctaggtgattgggggaaaggaaagaattcactagaaatttgtttagggtccagttgatttgtgtatttttgttatcatttaatttgtaattttcgtttcagaagcaaatattcgtgttgtacaaatttctgattgccctaaatgtagagagactgatggggaaagtatgatgggtttgatttttatatcaaatcatcaggcatggagaaatatcttttagaagtgttaaaataaatgttcctactgtatatttaaaaaaaaaaaaaaaaaaaaaaaaaaaaaaaaaaaaaaaaaaaaaaaaaaaaaaaaaaaaaaaaaaaaaaaaaa

SEQ ID NO: 81 - DNA, 3027 bp, Homo sapiens
ctcgtcgccgccgccattttagctgttggttccggccgcaccgtgtgggctgtagtagcgggaggggtgggggtcctccagagttaagtggctgtcctcgactgtgcccatacagcagccagctttcttccttaataactgcccgttcgaagagtgcgaggatgtccaagcggcaccggttggacctaggggaggattacccctctggcaagaagcgtgcggggaccgatgggaaggatcgagatcgagaccgggatcgtgaagatcggtctaaagatcgagaccgagaacgtgatagaggagatagagagcgagagagggagaaagaaaaggagaaggagttgcgagcttcaacaaatgctatgcttatcagtgctggattaccacccctgaaagcttcccattcagctcactcaacccactcagcacattcaacgcattctacacattctgctcattcaacgcatgccggacatgcaggtcacacgtcacttccacagtgcattaatccgttcaccaacttaccccatactcctcgatactatgatattctaaagaaacgtcttcagctccctgtttgggaatacaaggataggtttacagatattctgggtagacatcagtcctttgtactggttggtgagactgggtctggtaaaacaacacaaattccacaccggtgtgtggagtacatgcgatcattaccaggacccaagagaggagttgcctgtacccaacccaggagagtggctgcaatgagtgtggctcagagagttgctgatgagatggatgtgatgttgggccaggaagttggttactccattcgatttgaagactgcagtagtgcaaaaacattttttatgtatatgactgatgggatgttacttcgtgaagctatgaatgatcccctcctggagcgttatggtgtaataattcttgatgaggctcatgagaggacactggctacagatattctaatgggtgttctgaaggaagttgtaagacagagatcagatttaaaggttatagttatgagcgctactctagatgcaggaaaattccagatttactttgataactgtcctctcctaactattcctgggcgtacacatcctgttgagatcttctatactccagaaccagagagagattatcttgaagcagcaattcgaacagttatccagattcatatgtgtgaagaggaagagggagatcttcttcttttcttaactggtcaagaggaaattgatgaagcctgtaagagaataaagcgtgaagttgatgatttgggccctgaagttggtgacattaaaatcattccattgtattctacacttccacctcagcagcagcaacgcatttttgagcctccacctcccaaaaaacagaatggagcaattggaagaaaggtagttgtgtcaactaacatagcagagacgtctttgacaatagatggtgtggtgtttgtgattgatcctggatttgcgaaacagaaggtctacaatcctcgaatcagagttgagtcccttttggtgacagctattagtaaagcttcagctcagcaaagggctggtcgagctggacgtaccagacctggaaaatgcttcagactttacacagagaaagcttataaaacagaaatgcaggataacacctatcctgagattttgcgttctaatttaggatcagttgtgttacaattgaagaaacttggtattgatgacttggtacattttgattttatggatccaccagctcctgaaactctgatgagagccctggaacttttgaattacctggctgctttaaatgatgatggagatctgactgaattgggatccatgatggcagagtttcctctagatccacagctcgcaaaaatggttattgcaagttgtgactacaactgttctaatgaggtcctatctattactgctatgttgtcagtcccacagtgttttgttcgccccacggaggccaagaaagccgcagatgaggccaagatgagatttgcccacatagatggagatcatctgacactgctgaacgtctaccatgcttttaaacaaaatcatgaatcggttcagtggtgttatgacaacttcattaactacaggtccctgatgtccgcggacaatgtacgccagcagctatctcgaattatggacagatttaatttgcctcgtcgaagtactgactttacaagcagggactattatattaatataagaaaagctttggttactgggtattttatgcaggtggcacatttagaacgaacagggcattacttaactgtgaaagataaccaggtggttcagttgcatccctctactgttcttgaccacaaacctgaatgggtgctttataatgagtttgttctaacaacaaagaattacatccggacatgtacagacatcaagccagaatggttggtgaaaattgcccctcaatattatgacatgagcaatttcccacagtgtgaagcaaagagacagttggaccgcatcattgcccaaacttcaatccaaggaatattcacagtactgaattcagtgcttagaactgaagttattgagaggacagctttaaaagatgaatgaactcaaaagttcgagttgtgctcttcacgttggttcgataatggcctttatttgaaagctttttaatttttctttacagtaaatattccattctgatttcataaattaaacatttatgcctcccttttgtgttgacactgtagctcatactggaaaagtcgatcaatgttttgcagtttattgaaagtagttctatatataacaatgttataagcatttctttagaaatggttgaaaatgcttctaaaatgtgattatcgaccatggtatgcatgatcgttgtaattgttgacattccttttagaagttgtgaaatgttacaacttgtgcttatgtagacacaattttttgtttcagtaccagaggcactgacttcaataaagtttatttatacgaaaaaaaaaaaaaaaaaaaaaaaaaaaaa

SEQ ID NO: 82 - DNA, 500 bp, Homo sapiens
ctctttccgtctcaggtcgccgctgcgaagggagccgccgccatgtctgcgcatctgcaatggatggtcgtgcggaactgctccagtttcctgatcaagaggaataagcagacctacagcactgagcccaataacttgaaggcccgcaattccttccgctacaacggactgattcaccgcaagactgtgggcgtggagccggcagccgacggcaaaggtgtcgtggtggtcattaagcggagatccggccagcggaagcctgccacctcctatgtgcggaccaccatcaacaagaatgctcgcgccacgctcagcagcatcagacacatgatccgcaagaacaagtaccgccccgacctgcgcatggcagccatccgcagggccagcgccatcctgcgcagccagaagcctgtgatggtgaagaggaagcggacccgccccaccaagagctcctgagccccctgcccccagagcaataaagtcagctggctttctcaaaa

SEQ ID NO: 83 - DNA, 2845 bp, Homo sapiens
agcaccaaatccaagatggcggccagcaggaggctgatgaaggagcttgaagaaatccgcaaatgtgggatgaaaaacttccgtaacatccaggttgatgaagctaatttattgacttggcaagggcttattgttcctgacaaccctccatatgataagggagccttcagaatcgaaatcaactttccagcagagtacccattcaaaccaccgaagatcacatttaaaacaaagatctatcacccaaacatcgacgaaaaggggcaggtctgtctgccagtaattagtgccgaaaactggaagccagcaaccaaaaccgaccaagtaatccagtccctcatagcactggtgaatgacccccagcctgagcacccgcttcgggctgacctagctgaagaatactctaaggaccgtaaaaaattctgtaagaatgctgaagagtttacaaagaaatatggggaaaagcgacctgtggactaaaatctgccacgattggttccagcaagtgtgagcagagaccccgtgcagtgcattcagacaccccgcaaagcaggactctgtggaaattgacacgtgccaccgcctggcgttcgcttgtggcagttactaactttctacagttttcttaatcaaaagtggtctaggtaacctgtaaagaaaggattaaaaatttaagatgttctagttctgctctctttgttttaaaaatcactgcttcaatctacttcaaaagaatggtgtttcttttcttgtccaattttatccaaaatcttcaagttacatttaacccataaggtttaaaaaaaaggaaaaaaaacggttgtggttccctttcttccctacccttgccactcccactttctggcaccgagtttatttttcacttacttacttccccagaccccgggctcgcctccacaaaggagaagagactgccctggcggtcctggtggcttttcttagcatgtgtggcactgttgcccagtgtgggagttggtttaaattctcctgactccagtttataacatccttttaaaaaatttaaaaacaaacagccacacccctcctccagtccttctcctcagttcttgtgtgaaactccagctgatgttaccacagtaacatcagttaattgggcaagccctgatgtcagtgtgtgtaactgacctctggcctggcctgcacagagaagccctataatcacaggtctgtggtggccccgaaatggggggcctgctagtcaggaggatgctgtgcacactgtgtgtgatgaatctcgccagaaaggctcctgaggtcccaggttggcacttctccctgcagccattgtagaagatctgctggtccttgcaggcaaagctacagccagaatgtccgtttgaaactcctagctcatctgtcaccgagcttcatccgaatgtgccacggagcttgctctccacttcctccgtgcagtggccctgccacagccctccctcggcacactttgaccctttgtaggattggaattagcaggactcggctatttaaagcaccagtctggggtcgcctgggcccctgctgaccccctcctccagagcagccagcccagcccgggaacaagacggacttcctctcccttcggactcacagcctttgcagagtcaagctccacttgaagctcactcagtaatatcctttcaatgtgttttatattgttttgactgcctttttttgtagaaataaaaattgaccttagaatttatcgtcagataaacttgtaaagatttgaatattaatgtcttttcaaggcaaatgggattgtccccgcactagtagagaatccatgtcgctctgacaccccaaggaagccgacgatccaaatgccgtgtgtcaccaaccccgcttctgccactggcggcttcccttcttggctcttgggggggactagatcctgtggagaagatgacttaaactttgctttttgttttaattttaattctataacttgagatctttccggggcctacaggcgtgtaagacagcttggtctggtctgtgcagaagtggggagtgatgggcaggttcggcagcctaacattgttcaggcgcatggcccctgcggtgtgtacacgaactcggcttcttttgtcctaggtacgccaagggcaggtttctggagactcccttgtgcccgggatggcaagggcaccgggctggcgtttccacatctgtcttcattagcagaaaagtgatgatggattttatttcactcacactccagtttgtaataaaatgccaaattctgtcagctatccaaacaagccaccatttgttcttgttgcttctctggatccagaaatgttgccattcttggaaactgtcccattgcttcgtatttctgccaacgtagctctgcctgcctgtcaacccctcactgcactctgctcatcacgggaggatacctgtgtgccggcagcccctcagggactctcagccctggcactggcaccccagggttggccccgtcagcagaggcttggctttcgagccagtgggtgtctctcctttgggcctgggcggcttgctcctgccagccatgccttcagggtaggctctgagcaagctggcgaacagccctggctgctccaaaaccaaaaagctgggtcctctggaggaggggcgagctgtggagcagccacccactgctgccccaagctcactcaggaattcacacccgcctggtttcttgaagtgtgctgggtccttccctctgctccctactccccaccacggcagagaataggctttctaagatgctgcgatcccgttctgctgcccgtaataaaaatgctctcagacactg

SEQ ID NO: 84 - DNA, 1135 bp, Homo sapiens
atgaccccaatacgcaaaattaaccccctaataaaattaattaaccactcattcatcgacctccccaccccatccaacatctccgcatgatgaaacttcggctcactccttggcgcctgcctgatcctccaaatcaccacaggactattcctagccatgcactactcaccagacgcctcaaccgccttttcatcaatcgcccacatcactcgagacgtaaattatggctgaatcatccgctaccttcacgccaatggcgcctcaatattctttatctgcctcttcctacacatcgggcgaggcctatattacggatcatttctctactcagaaacctgaaacatcggcattatcctcctgcttgcaactatagcaacagccttcataggctatgtcctcccgtgaggccaaatatcattctgaggggccacagtaattacaaacttactatccgccatcccatacattgggacagacctagttcaatgaatctgaggaggctactcagtagacagtcccaccctcacacgattctttacctttcacttcatcttgcccttcattattgcagccctagcaacactccacctcctattcttgcacgaaacgggatcaaacaaccccctaggaatcacctcccattccgataaaatcaccttccacccttactacacaatcaaagacgccctcggcttacttctcttccttctctccttaatgacattaacactattctcaccagacctcctaggcgacccagacaattataccctagccaaccccttaaacacccctccccacatcaagcccgaatgatatttcctattcgcctacacaattctccgatccgtccctaacaaactaggaggcgtccttgccctattactatccatcctcatcctagcaataatccccatcctccatatatccaaacaacaaagcataatatttcgcccactaagccaatcactttattgactcctagccgcagacctcctcattctaacctgaatcggaggacaaccagtaagctacccttttaccatcattggacaagtagcatccgtactatacttcacaacaatcctaatcctaataccaactatctccctaattgaaaacaaaatactcaaat

SEQ ID NO: 85 - DNA, 1099 bp, Homo sapiens
cggccggagtgcggcgctgggcggaagctaccatggcggccgagagaaagacaaagttgtccaagaatctgctgcgcatgaagtttatgcaaaggggactggactcagaaaccaagaaacaactagaagaagaagaaaagaaaatcattagtgaagagcactggtacttggatttgccagagcttaaagagaaagagagtttcataatagaagagcagagtttcttactatgtgaagatcttctctatggaagaatgtcattcagaggatttaatcctgaggttgagaaattgatgcttcagatgaatgctaagcacaaagcagaagaagttgaagatgaaacagtagagcttgatgtgtcagatgaagagatggctagaagatatgagaccttggtggggacaattgggaaaaagtttgccagaaagagagaccatgccaattatgaagaagatgaaaatggagacatcacaccaattaaagcaaagaagatgttcttaaagccccaggattaagatggatgccttaagcgatggcccaggggtgcttggtggaagtcagcagggcatctggagctcatcccaatggtgtctctatagttattaatactgtaacgtttacttgtaaagagattatcattttagaaacatgctgtttttgaaacagatgtgtgatggatgttgtacatcctttgcttcttggtattcattcagagtggatttttagcccctgatctacaaatgtacattgttacagggctgcttcctaaagattttttttacctcaggtttctcttaatatagttctccagtcactgaccttgaattgacttacataaactactgccaatgtttaaattgcccttatgtttatgtttattatgtcaagccaattcgtacatacaatttggaatcaagtgtcataagaatttattatataaatttatcaagaataaaaatgcctctccagccttaagtatttacatgctcccaggtcattgtcagtttatggtattatgttgttttatttaaagcattgaattgatagaaaaatttgctctgtaataaaaatctactttcaaaaaaaaaaaaaaaaaaaa

SEQ ID NO: 86 - DNA, 1731 bp, Homo sapiens
gggggaggctgtgatgggttgacaggtgcgtgacagtgggagctgctctcggcacaagcatgtacggcaaaggcaagagtaacagcagcgccgtcccgtccgacagccaggcccgggagaagttagcactctacgtatatgaatatctgctccatgtaggagctcagaaatcagctcaaacatttttatcagagataagatgggaaaaaaacatcacattgggggaaccaccaggattcttacattcttggtggtgtgtattttgggatctctactgtgcagctccagagagacgtgaaacatgtgaacactcaagtgaagcaaaagccttccatgattacagtgctgcagcagctcccagtccagtgctaggaaacattcccccaggagatggcatgccagtaggtcctgtaccaccagggttctttcagccttttatgtcacctcggtaccctggaggtccaaggcccccattgaggatacctaatcaggcacttggaggtgtcccaggaagtcagccattactccccagaggaatggatccaactcgacaacaaggacatccaaatatgggtgggccaatgcagagaatgactcctccaagaggaatggtgcccttaggaccacagaactatggaggtgcaatgagacccccactgaatgctttaggtggccctggaatgcctggaatgaacatgggtccaggtggtggtagaccttggccaaacccaacaaatgccaattcaataccatactcctcagcatctcctgggaattatgtaggtcctccaggaggtggagggccaccaggaacacccatcatgcctagtccagcagattcaaccaactctggtgataacatgtatactttaatgaatgcagtacctcctggacctaacagacctaattttccaatgggccctgggtcagatggtcccatgggtggattaggaggaatggagtcacatcacatgaatggctctttaggctcaggagatatggacagtatttccaagaattctcccaataatatgagcctgagtaatcaaccgggcactccaagggatgatggcgaaatggggggaaatttcttaaatccttttcagagtgagagttactcccctagcatgacaatgagcgtgtgatccattaccaagtctcctcatgaaaaccacagtgagtcagcccttcacagaactactacggaagaaaattattcatcacagtgtacagttaaacaaaggaatctcagtcacaccaaaccaaccttttcatttcctgctctctcccctcttttgtgaagaaagcgggtccagatgtgattcaaacaactgtacggagtggcatattagaattgccctaaactgaactgcaaataattatgtgtgtatgtatatgtgtgggaaagagaatgtactgtatatgtgtatgttatacagacatatacacatacatacattgacccacaggacattgtaaaatattatcacatgacatcttaagtagaaataagtagggacttttattccatcctttttttcacgtttacattttaattattacaagttgctcctgccccctccctgaactattttgtgctgtgtatatcactgctttatataagttattttttaaggtgaactcagatgttatggttttgtatatgtctgcaatcatggataggaataaaatcgcttatttgagagctttcaaaaaaaaaaaaaaaaaaac

SEQ ID NO: 87 - DNA, 957 bp, Homo sapiens
atacccatggccaacctcctactcctcattgtacccattctaatcgcaatggcattcctaatgcttaccgaacgaaaaattctaggctatatacaactacgcaaaggccccaacgttgtaggcccctacgggctactacaacccttcgctgacgccataaaactcttcaccaaagagcccctaaaacccgccacatctaccatcaccctctacatcaccgccccgaccttagctctcaccatcgctcttctactatgaacccccctccccatacccaaccccctggtcaacctcaacctaggcctcctatttattctagccacctctagcctagccgtttactcaatcctctgatcagggtgagcatcaaactcaaactacgccctgatcggcgcactgcgagcagtagcccaaacaatctcatatgaagtcaccctagccatcattctactatcaacattactaataagtggctcctttaacctctccacccttatcacaacacaagaacacctctgattactcctgccatcatgacccttggccataatatgatttatctccacactagcagagaccaaccgaacccccttcgaccttgccgaaggggagtccgaactagtctcaggcttcaacatcgaatacgccgcaggccccttcgccctattcttcatagccgaatacacaaacattattataataaacaccctcaccactacaatcttcctaggaacaacatatgacgcactctcccctgaactctacacaacatattttgtcaccaagaccctacttctaacctccctgttcttatgaattcgaacagcatacccccgattccgctacgaccaactcatacacctcctatgaaaaaacttcctaccactcaccctagcattacttatatgatatgtctccatacccattacaatctccagcattccccctcaaacctaa

SEQ ID NO: 88 - DNA, 6947 bp, Homo sapiens
ggggctgaaagacacacagaagtcttcatggatatagttgatacatttaatcatttaattcctactgaacacttagatgatgccctatttctaggatccaacctggagaatgaagtctgtgaggattttagtgcaagtcaaaatgtcttagaggactcgctgaagaacatgctcagcgataaggatcctatgctaggatctgcaagtaaccagttctgtttgcctgttttggatagcaatgatcccaatttccagatgccttgttcaacagttgttggtcttgacgatattatggatgaaggagttgttaaagaaagtggcaatgataccattgatgaagaagaactgattttacctaacaggaacttaagggacaaggtagaagaaaattcagtgagatctccaagaaaatcacctcgtttaatggcacaagaacaagtaagaagtttgcgacagagcactattgccaagcgttcaaatgcagcaccattaagtaacacaaaaaaagcatctgggaagactgtatctactgctaaagcaggagtgaaacaaccagaaaggagtcaggttaaagaagaagtatgtatgtcactgaaacctgagtaccataaggagaatagaaggtgcagccgaaatagcggacaaattgaagtggtacctgaagtatcagtgtcttcaagtcattcttcagtgtcatcttgtcttgaaatgaaggatgaagatggattagattctaagcataagtgtaataatccgggagaaatagatgtgccatctcatgaattaaattgttcacttctttcagagacttgtgttactattggagaaaagaaaaatgaagctttgatggaatgtaaagccaagcctgttggtagtccattgtttaagttttcagataaagaagaacatgaacaaaatgattccatttcaggtaaaacgggtgagactgttgttgaagaaatgatagcaacaagaaaagttgaacaagattcaaaggagacagtaaaattatcccatgaagatgaccatattcttgaggacgctggatcttctgatatttctagtgatgctgcttgtacaaatccaaataagacagaaaacagccttgtaggtttgcctagttgtgtagatgaagtgactgaatgtaatttggaattgaaggataccatgggtattgctgataaaactgagaacacccttgaaagaaataaaattgaaccgttgggttattgtgaagatgcggagtctaataggcagttggagagcactgagtttaataaatcaaacttagaggtggttgatactagtacttttggaccggaaagtaatatcttggaaaatgctatttgtgatgtgcctgaccaaaattcaaaacagttgaatgctatagaaagtactaaaatagagtcccatgaaacagcaaaccttcaggatgacagaaacagccagtcaagtagcgtttcttacttagagtcaaaaagtgtaaaatccaaacatacaaaacctgtaattcattctaagcaaaacatgaccacagatgctccgaagaaaattgttgcagcaaagtatgaagtaatacatagcaaaactaaagttaatgtcaaaagtgtgaaacgaaatactgatgtaccagaatctcagcaaaattttcataggccagtcaaagtcagaaaaaaacaaattgataaggagccaaagattcagagttgcaattctggggttaaatctgtgaaaaaccaagctcattctgtactgaaaaaaacattacaggatcaaactttagtacaaattttcaagcccttaactcattctttgagtgataagtcacacgctcatcctggttgcttgaaagaacctcatcatcctgcacaaactggacatgtatcacattctagccagaaacagtgtcataagcctcagcaacaggccccagcaatgaaaaccaatagtcacgtgaaggaagagcttgaacacccaggcgttgagcattttaaggaagaggataaactgaaactgaaaaaactgagaagaacctacaaccccgccaaagaagaagcagcaaaagtttttctttagatgagccaccattgttcattccagataacatagctaccataagaagagaaggctctgatcatagctcctcatttgaaagcaaatatatgtggactcccagcaagcagtgtgggttttgcaaaaaaccacatggcaacaggtttatggttggctgtgggagatgtgatgactggtttcatggtgattgtgttgggttaagtctttctcaagcacagcagatgggcgaggaagacaaagaatatgtctgtgtaaaatgttgtgctgaagaagacaaaaagactgaaatactagatccagatactttggaaaaccaagctacagttgaattccatagtggagataaaacaatggagtgtgaaaagcttggattatcaaaacacacaacaaatgatagaaccaaatatatagatgatacagtgaagcacaaggtcaaaattttaaaacgggagtctggtgaaggcagaaattcatcagactgtagagataatgaaattaaaaaatggcagctagctcctcttcgtaagatgggacaaccagttttacctcggagatcctcagaagaaaaaagtgaaaaaataccgaaagagtctacaactgttacttgcacaggagaaaaagcttcaaaaccaggtactcatgagaagcaagagatgaaaaagaagaaagttgaaaaaggagtgcttaatgtacatcctgctgcttctgcttccaagccttctgcagatcagatcaggcaaagtgtcagacattctctcaaagacattcttatgaagagacttacagactcaaatttgaaggtaccagaggaaaaggcagcaaaagttgccacaaaaattgagaaagagcttttctctttttttcgggacacagatgctaaatataagaacaaatatagaagtttgatgtttaatttgaaagatcctaaaaacaatatattatttaaaaaagtactgaaaggagaagtaactcctgatcatcttatcagaatgagtccagaagaactagcttctaaagagttagctgcttggagacgaagagaaaacagacataccatagaaatgattgagaaagagcagagagaagtggaacgacggccaatcaccaaaataactcataaaggtgaaatagaaattgagagtgatgccccaatgaaagaacaggaagcagccatggagattcaggaaccagccgccaataagtcattggagaagccagaaggatctgaaaaacaaaaagaggaggttgactctatgtctaaagataccactagtcaacacagacagcatctttttgatctcaactgcaaaatctgcataggtcgaatggcaccacctgtagatgatctttctccaaaaaaagtaaaagttgttgtaggagtagctcgcaaacattcagacaatgaagcagaaagtatagcagatgcattatcttcaacctcaaatattttggcttctgaattctttgaggaggagaaacaggagtctccaaagtcaacgttctctcctgctccacgtccagagatgcctggaactgttgaagttgagtctacctttctggctcgattgaacttcatctggaaaggttttatcaacatgccttctgtggcaaaatttgttaccaaagcctatccagtatctggctccccagaatacctgacagaggacctaccagatagtattcaagtaggtggcaggatatcacctcagacagtttgggattatgtggaaaaaataaaagcatcaggaaccaaggaaatttgtgtggttcgcttcacaccagtaactgaagaagatcaaatttcttatactttgctctttgcatacttcagtagcagaaagcgctatggagtagctgctaacaacatgaagcaggttaaagatatgtaccttattcctttgggtgccacagataaaattccacaccctcttgtgccttttgatggacctgggcttgaactgcatagacctaatctattgttgggcttaattattcgtcagaaactgaagcgacagcacagtgcctgtgctagtactagtcatatagctgagactcctgaaagtgcaccaccaatagcattgccacctgataaaaaaagtaaaatagaagtttctacagaagaagcaccagaggaagaaaatgacttttttaattcttttacaactgtattacacaagcagagaaataaacctcagcagaatcttcaggaagaccttccaacagcagttgaacctttaatggaagtcaccaaacaggagccaccaaaacctttaagatttcttcctggcgtgttgattggctgggagaatcaacctactactctggaattagcaaataaacctcttcctgtggatgatatacttcaaagccttttgggcaccactggtcaagtatatgaccaggcccagtcagtgatggaacaaaacactgttaaagaaattccatttttaaatgagcagaccaactcaaaaatagagaaaacagataatgtggaagtaactgatggtgaaaacaaggagataaaagttaaagtagataatatttcagaatctacagataagtcagcagaaatagaaacatcagtagtagggtcctcttccatttctgcagggtctttgacgagtcttagtctcagaggtaagccaccagatgtttctacagaagcatttttaacaaatttatcaattcagtcaaaacaagaggaaactgtggagagtaaagagaaaacattaaaaagacagcttcaggaagatcaagagaataatttgcaagataaccagacttcaaatagttctccatgcagatctaatgtaggaaaaggaaacatagatggtaatgtgagctgtagtgaaaaccttgttgctaatacagcgaggtctccacagtttatcaacctgaaaagggatcctaggcaagcagcaggacgaagtcagcctgtaactacttcagaaagcaaagatggagatagttgccggaatggagaaaaacacatgctgcctggcctgtcacacaacaaggagcacttaacagaacaaatcaatgtagaggaaaagttgtgttctgcagagaaaaactcgtgtgttcagcagagtgacaatttaaaagttgcacaaaactcaccatcagtagaaaacatacagacttctcaagcagaacaagcaaaacccttacaggaggatattttaatgcaaaatattgaaactgtgcacccatttcgaagaggatcagcagtagcgacatctcattttgaagttggaaacacatgtccatcagaatttccttctaaaagcatcacctttacttccagaagcaccagccccagaacaagtacaaacttttcacccatgaggccacagcagcccaaccttcagcatctcaagtctagcccacctggatttccatttccagggcctcctaattttcccccacaaagcatgtttggatttccaccacatttgccacctccattacttccccctccaggctttggctttgctcaaaatcccatggttccctggccacctgttgttcatctcccaggtcagccacagcgtatgatgggtcctctctcacaagcatcaaggtatataggcccgcagaatttttaccaggttaaagacattcggaggccagaaaggcgccatagtgacccttggggtaggcaagaccaacagcaactggataggccatttaataggggtaaaggggaccgccagagattttatagtgattcacaccatttgaaaagagagcgacatgaaaaggaatgggagcaagaatctgaaaggcatagacgcagagacagaagccaagacaaggacagagacagaaaaagcagggaggaagggcacaaagataaagagagggcacggttatcacatggtgatcgaggaacagatggaaaagcaagcagagatagtaggaatgtagacaagaagccagataaacctaaaagtgaagactatgagaaggacaaagaacgagagaaaagtaaacacagagaaggagaaaaggacagggataggtaccacaaagatagggaccacactgacagaactaaaagcaaaaggtaaaatttgcaggctgcttcaggattacatttaaataactgttaaaatgttgtatcttgtaaacaaaagaaagattgcctgctaggattgtgccatctttaaaatttttactattggtcatttgcagaacagtaaattctgtgtgttggtacagagtgctctgtaccagtgctcatcatcccttcttcataccaacggtccctagttataggaatttaatatttttaaaagttttacattgctgtatattcaaagatttgttttattaatatgcaataaaggcttagaaattttagttttattccttaattggtaaatatggttaactatggaatatatttacttcctctagtgaatgtcctttatataatgactaatttgggagtaatgtgtgctctgtaagtttgttttaaattgcactgtttttaaagaaactgtagaggagcaacaaaaatccaagcaacttcataatcagattatgctaatcatttagttgagcagtttttgaccaagaatcagaagcccaaggggtacatttattgctttaatctgcactcattgaagtcatttattaccatatactacagctttgtggtaggccattattttcattttcatttttggctcttcagaaacttgaatacttaagcttgtacatgatcttgtgttttgctatcctttttactgtaaaatgtaaatattttaagggatattttgattctaaatatgataaaataatttctcacctattttgtgtgtgtgacttgaaattcagtagtaaaagaatttcttctttaaagcttt

SEQ ID NO: 89 - DNA, 3597 bp, Homo sapiens
ggcacgagcggcgccgccgcccgctagtccgccgcccggcgccatggcgggctgcgcggcgcgggctccgccgggctctgaggcgcgtctcagcctcgccaccttcctgctgggcgcctcggtgctcgcgctgccgctgctcacgcgcgccggcctgcagggccgcaccgggctggcgctctacgtggccgggctcaacgcgctgctgctgctgctctatcggccgcctcgctaccagatagccatccgagcttgtttcctggggtttgtgttcggctgcggcacgctgctaagttttagccagtcttcttggagtcactttggctggtacatgtgctccctgtcattgttccactattctgaatacttggtgacagcagtcaataatcccaaaagtctgtccttggattcctttctcctgaatcacagcctggagtatacagtagctgctctttcttcttggttagagttcacacttgaaaatatcttttggccagaactgaagcagattacctggctcagtgtcacagggctgctgatggtggtcttcggagaatgtctgaggaaggcggccatgtttacagctggctccaatttcaaccacgtggtacagaatgaaaaatcagatacacatactctggtgaccagtggagtgtacgcttggtttcggcatccttcttacgtcgggtggttttactggagtattggaactcaggtgatgctgtgtaaccccatctgcggcgtcagctatgccctgacagtgtggcgattcttccgcgatcgaacagaagaagaagaaatctcactaattcacttttttggagaggagtacctggagtataagaagagggtgcccacgggcctgcctttcataaagggggtcaaggtggacctgtgacgggcagtggccccggtgaccttggggcctccgaccctgtgcagcctgggacaaaactgtttccggttggccgctgccacatggattttcttaatcgttttatgtcattagtcactcttctggaatgtcactcaagaccaagcggtcagaaggcctgaggacccaaggccccactggagcagtctgtccttatgccgaatcaaggcggaacatgggtgaaagacgagtaaggggcaaatcacagcaatattccacagcgccctccagagttacctggggaggaccgaggccacacgccactgcccccgaggccagagtgtaagtaaaggataaccaggactcgctgggagagatggactctgtcctcagcaacactccacagcagaaaggggtagcaggtaccccttcttatcagcggtaaaaatgcatttacaacctttcatttaaccgaaaaacacagaccgctttaacctctttatttctgtcccccactgcatgaacatctatacaattttaaaaatacttcctcataggatgctttggcccttcatctatttaatcatagctacatacctatttttttataagtagcagtacacattcaaaggggtattcctagctcaatgcttggtgttctagttcaacttttatcctgcagcaagtaagcctagataactctacacgatttggctgagtggctttgtgtgaccgtggccccaggccaaggggaccatggccctggctggctttcccccgggggtctcagctcctgttgtcagtgataggcggctcaaaggagcatcagtttcttttgatccaagaagtgcttactgaatgcctgccctgtgcgtggccttaaacattgagaagtgctgctctccgtttatttgggatttgattctcattttaccatagcttatattctcaatttcaatgccagtctcagaactcttgttttctgtgttctgttctcaaaattacattgtccctcatgtcatttcaaactgttttccaaagggatttgagcatatacaactacaaatccaagcagattgactctcaaaaataatcttaaatactgcaaatagtcccaactaagattcagtcagtatgtttgttttgcaagtttgggagagtaagttggctttgagtcacacatcgaagctttaagaggtgagacgctggcttcattctggactagacaggaacttggcctcagcgtgagatcctgccatgcagtgttgcggtggcactgaagaagtgtgaatgtgaaggcggcgtcggcgcggggccagagcaccactctgctgccccaccacgcggcctgtgaggagccactaaacctttccgtgcctagacctccccatctgtggaatggggtcaataccacctacctcacaggggtgttgtgaggactgagaagaacaatgtcaaatgtttttaatactcagatgtgggagcgacatcaatgaaatctgtactgtatgaaagctacacaaaaatgggcagacatttggttaattgtgccagatacctaaaatgtatgttcagaaaagcattttatcaactcagaaatatgacttatttctagattcatggcttaatgaattttttcattgttatatataccaaagaggcttacgggttcattgattggtttgaaaaccagacagacggccgggcacgcctgtaatcccaaagtgctgggattgcagcgtgagccaccacgcccagccaagatgaactccttaaggacaggatttggtaagtgattgacttctttttagttccatgatcttgagattatttttagctttataaatttagcagtggcagggcccgtggagaatcaggttaatgaggtaaaggctttctgggtatttgctgccaaggccacatcaccaattttctcgatttaaaaaactgtcaagagatttatttttccattgcaggttttaaagtggagattctgaagtggaaaataggtactgtcagaacaaagctacctggaaacagcatagagtgaagcctttcgtgagggcttgcaggccgctgctgagtggcagtttacagaagaggtcgcggggtgagcctcttagcaggacagaaaacaaggcagcagcgcacctgccaccccttcacgagctgctccttgagcctaaaaagtaggctttattcatcccttctgttcatttaccaacctgggggattgatacgaccggggaaaatgttcctaaaccaggaagctgcgttagccgatcaggctttgtaagatctcgccaacagctagctgcttaggagtacccccacgatacgcacagcacaccactgtcccttcactgcactttcttcctgccttaggtagttgggcttgcccaccctagtttgcttttgtagtggtttggcaaggttagaaggcctcggcctctctgtcatgctgggaagtgcctactctctgggccactgctgcagaggccgtggcacttgtcatgggtttggaagacccagccatctgcagcagaggcagcctatcccattgcaaggagaggaactgaacggagtaattattctactcttctttttacataaatgtttatttaaatattctaaattggattttcattcacagatactgattattctttccagttcttaaataaaactgcacttgatttcactcaaaaaaaaaaaaaaaaaaa

SEQ ID NO: 90 - DNA, 7710 bp, Homo sapiens
caaccaaccagtggttcatcccagccgtgaggggggacattccccctgggtgtgcagcctatggcttcgtgtgtgacgggactcgcctcctggtgtttggtgggatggtggagtatgggaaatacagcaatgacctctacgaactccaggcgagccggtgggagtggaagagactcaaagcaaagacgcccaaaaacgggccccctccgtgtcctcgactcgggcacagcttctcccttgtgggcaacaaatgctacctgtttgggggtctggccaatgatagcgaggacccaaagaacaacattccaaggtacctgaatgacttatatatcctggaattacggccaggctctggagtggtagcctgggacattcccatcacttacggggtcctaccaccaccccgggagtcacatactgccgtggtctacaccgaaaaagacaataagaagtccaagctggtgatctacggcgggatgagtggctgcaggctgggggacctgtggaccctagatattgacaccctgacgtggaataagcccagtctcagcggggtggcgcctcttcctcgcagtctccactcggcaaccaccatcggaaataaaatgtacgtgtttggtggctgggtgcctctcgtcatggatgacgtcaaagtggccacacacgagaaggagtggaagtgtaccaacacgctggcttgtctcaacctggataccatggcctgggagaccatcctgatggatacactggaggacaacatcccccgtgctcgggctggccactgcgcagtcgccatcaacacccgcctgtacatttggagtgggcgtgacggctaccgcaaggcctggaacaaccaggtctgctgcaaggacctctggtacctagagacagaaaagccaccacccccagcccgagtacaactggtacgcgccaacaccaactccctggaggtgagctggggggcagtggcaacagccgacagctaccttctccagctccagaaatatgacattcctgccacggctgctactgccacctcccctacacccaatccggtcccatctgtgcctgccaaccctcccaagagccctgccccagcagcagccgcacctgctgtgcagccgctgacccaagtaggcatcacgctcctgccccaggctgcccccgcacccccgaccaccaccaccatccaggtcttgccaacggtgcctggcagctccatttctgtgcccaccgcagccaggactcaaggtgtccctgctgttctcaaagtgaccggtcctcaggctacaacaggaactccattggtcaccatgcgacctgccagccaggctgggaaagcccctgtcaccgtgacctcccttcccgccggagtgcggatggttgtgccaacacagagtgcccagggaacggtgattggcagtagcccacagatgagtgggatggccgcactggccgctgcggccgctgccacccagaagatccccccttcctcgcgacccacggtgctgagtgtcccagcgggtaccaccatcgtgaagaccatggctgtgacacctggcactaccaccctcccagccactgtgaaggtggcctcctcgccagtcatggtgagcgtgagcaaccctgccactcgcatgctgaagactgcagccgcccaggtggggacatcggtttcctccgccaccaacacgtctacccgccctatcatcacagtgcacaagtcaggcactgtgacagtggcccagcaagcccaggtggtgaccacagttgtgggcggggtcaccaagaccatcaccctggtgaagagccccatctctgtcccaggaggcagtgctctgatttccaatctgggcaaagtgatgtcggtggtccagaccaaaccagttcagacttcagcagtcacaggccaggcgtccacgggtcctgtgactcagatcatccagaccaaagggcccctgccagcgggaacaatcctgaagctggtgacctcagcagatggcaagcccaccaccatcatcactaccacgcaggccagtggggcggggaccaagcccaccatcctgggcatcagcagcgtctcccccagtaccaccaagcccggcacgaccaccatcatcaaaaccatccccatgtcggccatcatcacccaggcgggcgccacgggtgtgaccagcagtcctggcatcaagtcacccatcaccatcatcaccaccaaggtgatgacttcaggaactggagcacctgcgaaaatcatcactgctgtccccaaaattgccactggccacgggcagcagggagtgacccaggtggtgcttaagggggccccgggacagccaggcaccatcctccgcactgtgcccatggggggtgttcgcctggtcacacccgtcaccgtctccgccgtcaagccagccgtcaccacgttggttgtgaaaggcaccacaggtgtcacgaccctaggcacagtgacaggcaccgtctccaccagccttgccggggcggggggccacagcactagtgcttccctggccacgcccatcaccaccttgggcaccattgccaccctctcaagccaggtgatcaaccccactgccatcactgtgtcggccgcacagaccacgctgacagcggcaggcgggctcacaaccccgaccatcaccatgcagcccgtgtcccagcccacccaggtaactctgatcacggcacctagtggggtggaggcccagcctgtgcatgacctccctgtgtccattctggcctccccgactacagaacagcccaccgccacagttaccatcgccgactcaggccagggtgatgtgcagcctggcactgtcaccttggtgtgctccaacccaccctgtgagacccacgagactggcaccaccaacacggccaccactactgttgtggctaaccttgggggacacccccagcccacccaagtgcagttcgtctgtgacagacaggaggcagctgcttctcttgtgacctcgactgtgggccagcagaatggtagcgtggtccgagtctgttcgaacccgccctgcgagacccacgagacgggcaccaccaacaccgccaccaccgccacctccaacatggccgggcagcatggctgctcaaacccaccctgcgagacccacgagacgggcaccaccaacactgccactacagccatgtcgagcgtcggcgccaaccaccagcgagatgcccgtcgggcctgtgcagctggcacccctgccgtgatccggatcagtgtggccactggggcgctggaggcagcccagggctctaagccccagtgccaaacccgccagaccagcgcgaccagcaccaccatgactgtgatggccaccggggccccgtgctcggccggcccactccttgggccgagcatggcacgggagcccgggggccgcagccctgcttttgtgcagttggcccctctgagcagcaaagtcaggctgagcagcccaagcattaaggaccttcctgcggggcgccacagccatgcggtcagcaccgctgccatgacccgttccagcgtgggtgctggggagccccgcatggcacctgtgtgcgagagcctccagggtggctcgcccagcaccacagtgactgtgacagccctggaggcactgctgtgcccctcggccaccgtgacccaagtctgctccaacccaccatgtgagacccacgagacaggcaccaccaacaccgccactacctcgaatgcaggcagcgcccagagggtgtgctccaacccgccatgcgagacccacgagacgggcaccacccacacggccaccaccgctacttcaaacgggggcacgggccagcccgagggtgggcagcagccccctgctggtcgcccctgtgagacacaccagaccacttccactggcaccaccatgtcggtcagcgtgggtgccctgcttcccgacgccacttcttcccacaggaccgtggagtctggcctagaggtggcggcggcacccagcgtcaccccccaggctggcaccgcgctgctggctcctttcccaacacagagggtgtgctccaaccccccctgtgagacccacgagacgggcaccactcacacggccaccactgtcacttccaacatgagttcaaaccaagaccccccacctgctgccagcgatcagggagaggtggagagcacccagggcgacagcgtgaacatcaccagctccagtgccatcacgacaaccgtgtcctccacactgacgcgggctgtgaccaccgtgacgcagtccacaccggtcccgggcccctctgtgccgcccccagaggaactccaggtgtcgccaggtcctcgccagcagctgccaccacggcagcttctgcagtcggcttccacagccctgatgggggagtccgccgaggtcctgtcagcctcccagacccctgagctcccggccgccgtggatctgagcagcacaggggagccatcttcgggccaggagtctgccggctctgcggtggtggccactgtggtggtccagccacccccacccacacagtccgaagtagaccagttatcacttccccaagagctaatggccgaggcccaagctggcaccaccaccctcatggtaacggggctcacccccgaggagctggcagtgacggctgctgcagaagcagctgcccaggccgcagccacggaggaagcccaggccctggccatccaggcggtgctccaggccgcgcagcaggccgtcatgggcaccggcgagcccatggacacctccgaggcagcagcaaccgtgactcaggcggagctggggcacctgtcggccgagggtcaggagggccaggccaccaccatacccattgtgctgacacagcaggagctggctgccctggtgcagcagcagcagctgcaggaggcccaggcccagcagcagcatcaccacctccccactgaggccctggcccctgccgacagtctcaacgacccagccattgagagcaattgcctcaatgagctggccggcacggtccccagcactgtggcgctgctgccctcaacggccactgagagcctggctccatccaacacatttgtggccccccagccggttgtggtggccagcccagccaagctgcaggctgcagctaccctgaccgaagtggccaatggcatcgagtccctgggtgtgaagccagacctgccgcccccacccagcaaagcccccatgaagaaggaaaaccagtggtttgatgtgggagtcattaagggcaccaatgtaatggtgacacactatttcctgccaccagatgatgctgtcccatcagacgatgatttgggcaccgtccctgactataaccagctgaagaagcaggagctgcagccaggcacagcctataagtttcgtgttgccggaatcaatgcctgtgcgcgggggcccttcagcgaaatctcagcctttaagacgtgcctgcctggtttcccaggggccccttgtgccattaaaatcagcaaaagtccggatggtgctcacctcacctgggagccaccctctgtgacctccggcaagattatcgagtactccgtgtacctggccatccagagctcacaggctgggggcgagctcaagagctccaccccggcccagctggccttcatgcgggtgtactgcgggcccagcccctcctgcctggtgcagtcctccagcctttccaacgcccacatcgactacaccaccaagcccgccatcatcttccgcatcgccgcccgcaatgagaagggctatggcccggccacacaagtgaggtggctgcaggaaaccagtaaagacagctctggcaccaagccagccaacaagcggcccatgtcctctccagaaatgaaatctgctccaaagaaatctaaggccgatggtcagtgagaggaagctgactagcccctggattcttctccagacccccctgcttcaggaacacccgccagggcccacccctcccaccccgtcccagcattcgcacttcaccctcgcgagccgctgttcactcctctcccctttctctttctctctgtttttaaaataatctaaagaaagcacattttaccattgctgttgggaggaagcagaggcagatgggaaagcagagagaggagcgcgcttcctttcctccccgctgccgcccaccctggggagagacttttgcggggagggaaggcggacgtgaggacagccagctccccctcccaaggctgtgcgttcctgagggccaggtcgggggcaggcatggaggggaggaaaggcgtccctcttggccctccccagagtggctttcctggcaccctggcctgggtgtctggttctgttttcttttcttccccttgtgtttccagtcacctaacttcccttcctcaggctcccccggcccaccctgctcagtgaccccacaggaagcttacacattttctcagaggcctttgtgctcccacctcttctaccctccccctcttctttcccattttaaaaaagaaaagaaggaaaaagaaaaaaggggcaaggagccccgcggcggcctgggcagcgcctgtgcagacctccctgcaggccgcactgccaactgctgcatttgttgtgttttttaggttgcaattggtgaagttcacactttcattgtaattttagcgtgtggggttttgtcccttttttgttgttgttagctgtgtacagaatgtgtaatcttttttcttttctcttttttttgttttgttttgttttgtttttgtttttttacttttttcttcttggctaattcttggcagggatctttctggaggaaaagctggggccagccagggcaggagaggtgtgaaatctgccacgaggggcctgctgtttgccacccagcccaacttcctgttgctggcccctgccctctgcccttttgcctgtcctcaggccgctggaacaaaggaaggacagctcattcctcatgggcgatcactccgcatctatagggtcgagcctaggggagcttgagggagggctggggcctccttgtcctggatttccagctctccccatgccccctccctgagcaccaccggcaccgcctcccaaacagggctgctggtttccgcagccactgctccacctcccccaaatcgtcatggaaagggtggagaatggaggggaaccaggcgtccttggaggcagcttgggagggtgactgtgtagtgtcacccacaagggaggctagggcaatggagcaggccaccagcagcagctgtgcagcatggaactcaggccaggctccgaggctgggggatctgcttggagttttctgccccccaccccaaacttctgtcgaggagcaaggcttgccagcaagtcagaaggatttgaaccgagcagccaatctttccagccctcccctaccgacctctgcctggagacgcagcagcctgtgtcctccagggcctctggtttgttgtattatagtatatttcgctgtggaaaatgtcacgtttagtcaccttggagcccactcacctggtcctgttgttttaccccatcccttctctcgcgcgcctattgatttgtttctgaggagagtacaccgttcactattgtagagtaacccctgtgactcaatattaccatagtgcgatgtcgttttgtgctattttgaacaattaaaagactttttttgaaataa

SEQ ID NO: 91 - DNA, 4638 bp, Homo sapiens
tgaactgaggcgaactccgccgccaagtgagtgaggaggaggaggaggagaaggaggaggaggaagaggaggagcgcagtcggagcgcggcggcagcggcagaggcgccgcggcggggaccagcccagagagaccccccgagcccgcggcacaggcggcggcggcgctgagcgggctcgaccagccgagcgagcggcggccccggctcctcctcgtccggcgccagcagcccgcgccccgcgcccgcactcggccagccgagacccgcctcccgcccgcccgccggcctcgtgagggacgcgccgagccgggcggccgagagcggcggcggctgggagcgcgtcgggcccgggcggaaagtgcctgcggggggcgggcgagcgcgcggtgccggccgccccggggctcggcgcgggagccagagcgggagccggcgcggagcgggacgccgggtcccgagcggcccgcggccggggctcgcccccgcccctccctcctctccggcggcggcggcggcggcggcgggcggagtgagctgcggagcctggaatatggtcggggaaatggaaacgaaggagaagccgaagcccaccccagattacctgatgcagctgatgaacgacaagaagctcatgagcagcctgcccaacttctgcgggatcttcaaccacctcgagcggctgctggacgaagaaattagcagagtacggaaagacatgtacaatgacacattaaatggcagtacagagaaaaggagtgcagaattgcctgatgctgtgggacctattgttcagttacaagagaaactttatgtgcctgtaaaagaatacccagattttaattttgttgggagaatccttggacctagaggacttacagccaaacaacttgaagcagaaaccggatgtaaaatcatggtccgaggcaaaggctcaatgagggataaaaaaaaggaggagcaaaatagaggcaagcccaattgggagcatctaaatgaagatttacatgtactaatcactgtggaagatgctcagaacagagcagaaatcaaattgaagagagcagttgaagaagtgaagaaattattggtacctgcagcagaaggagaagacagcctgaagaagatgcagctgatggagcttgcgattctgaatggcacctacagagatgccaacattaaatcaccaacagcccaggctgctccaaggatcattactgggcctgcgccggttctcccaccagctgccctgcgtactcctacgccagctggccctaccataatgcctttgatcagacaaatacagaccgctgtcatgccaaacggaactcctcacccaactgctgcaatagttcctccagggcccgaagctggtttaatctatacaccctatgagtacccctacacattggcaccagctacatcaatccttgagtatcctattgaacctagtggtgtattaggtgcggtggctactaaagttcgaaggcacgatatgcgtgtccatccttaccaaaggattgtgaccgcagaccgagccgccaccggcaactaacctatgaccttctgacctctgaactcttcacccaatgatgacctgaccatgcctgcctgctgatcagttaactggtaatcgcctttgcttgcctgtcgtcagtgcagcgagctgaggcacttgtccgttcgtcttaccatctaaccaaacaaaagacaaagaaattgttgtcctccaactcagctttttttttttttttttcctgtttgggtgaaagtggttctagaaactgcactgaatagtagtaaagcaataaggcccaattcatcccacagcactgatcatcttttaatatcccaccctaagcgaacggtaagaaggcctctcttaagaaggggagacagatggtccttaactactcaatgacagaggcagttactgtgagagacttctaggaatctttttcttctcatagcgaagtcaaagctctctctgaatgtactgtgtgatgatgcatcatgcatgaaccttcggtcagggatatcattggtgaagtgatttcaaaaagtattcaaaatttgatatgctgtttagtcactacagtgccctcaaagggcagaagttgcagccttttttatattgcctgccaaaatttgaagtattagaagaaagtgtgccatgagagaaaaacttaaggagttttgaaaagtaatgcaaataacaaaactgcaacactatttttaaaaagataaatatctgagttaaaattactgaatctttattttacacctaaaaaaatatgagaacaaggtacatgcattatgtgtcacattactgggcaaactgttcaagtatttttttttaaacctccctgtatagaaaaaaatcattaaggatgtaaaagccatgcttgcctatttgctgtatacatgtaatgaaattgtagataaagtgtagtgcattgaaacaaatgaacaaaaagtagatacttttactatacaagggtgctggtgcagaaaaaaatatatatatttttggaaatgtagcattttatactttcaagtgttataaaaaaaaagaaaaagaacaaagaaaccctttatttcattaaatgattttttctggtggttgtcaagaaacaaaagaccaaaagagcctttttgtctttcttttttattttttaagtattggaataagtctaaagaaaagaaagtgccttattttccttcatggtcattcagtcaagtgtctcataaagatcagctcctccctcagaatacaagttaatgcatgttactcagtcgcccagtatgtgaaagaagatatgagggagacaaatgagttgatagtttgaattataggatttttgccacgttaccttgatgcaaatttgccaaatctgatactgtgaaaagatttgataacttttctaatgcctgactagtaagttttaaaacatcattctttaaaagaatagtttaatacttttggttattccaatcttcaatgttaacccaaaggattctgagataaaaattatgtgtcatctaaacttcagtttacagacaaaattagagctttgttttatttggagaagggggatgcattcatttgattttgttttttgtttttaattaattgaatataataggatacctagcaaatgttttcacaaaagtgaatctttgtgattttcattctagaaaacaatgttttaaatcacccaaatttaatcacatgtctttatatcataccagataactggtgtagtgtatccttttactgtttcaataacctctgcctcccccaccccttaactttaaaagaatgtgaaaaactagcatcatagtgcatataaatactcaaccacatttcagcttaagcttctaatttctcaagaagttgaaacagttagttatgtagttgaagcaatttgtgtgcaaagcctacatctaaacacttgagtgaataatcattaactgctcagtaccagacgtggcaaatctcaagtgacagtggacccccccccccgcccagcttatcaactcgtcccctcttccacaccttcccagcatcacagtcagaggtcagcaggaagctgagtcattaccttcttggtgacctcccccaccatcttgtctcacttggaaaccgttgtcagtttatttactatgcaatagacattcattgttttgtatccagctagctttggtttaatatgccactgctttgtctttctgttacacatacagttttgatttatttacaatatatgctgtgccattttgatttttatattgtttggttggttgaataaatttgcgacactcaaacacttgaggtgatagttgttaaaaacaataccagtatttgatccagtttcatctcaactatgttatacctggacattttagatgtttatcaaaggtcttttatggggaagaaagtaaatgtatgaaataataaatgtgtgacatttatagggaatgttggctctgaacaaacttttgaaaacttggttgacaaaattttggatcaactgaaaaaagcatgacttttgaaatctctgaatgccttggttctcagtattatcattctttattgaatttatttcttattaaaatatgtagtttttaagactttttttctgacagtattatgtaattttttagcgtgggtagatgggagtgtcgcttgtatgttatcgtacagctgacatgtatttttgtctattctttattatcttagtttcatgctatgtatgtaccataaccaacctattgcctatgagaaacatgtaagataatgtatttacagccattgttacaagtttataatgtatttttctatcttgttttatatgtatgttatataacattcaaaaagaatttttttcttgattgagaaaaggatacaaaatgcaaaatccacaattttgataactgaaaattgccaattgttttgcagtactttattatattgggtgtcttgtcttttttgggcttttagttagctaatgaatgaatacattagacacttttgggttttagttgggattttacatagcttgcattttaattctttggttctttgctgtttctattaacccacagcattattttaataaatgttataataccaacct

SEQ ID NO: 92 - DNA, 481 bp, Homo sapiens
tctccttgccgggtcagccctgacaaaggtcagctagccccttgaggacatcagctttggcctcagggtcctaatggcagcagaaccactgacagagctagaggagtccattgagaccgtggtcaccaccttcttcacctttgcaaggcaggagggccggaaggatagcctcagcgtcaacgagttcaaagagctggttacccagcagttgccccatctgctcaaggatgtgggctctcttgatgagaagatgaagagcttggatgtgaatcaggactcggagctcaagttcaatgagtactggagattgattggggagctggccaaggaaatcaggaagaagaaagacctgaagatcaggaagaagtaaagccgcctggctgagatggggtgggcagggcagagctgatcagggccgagcagaaccgcactcttcccaaataaagcttcctccttgaaaaaaaaaaaaaaaaaaaaaaaa

SEQ ID NO: 93 - DNA, 1105 bp, Homo sapiens
gcggccaccgttttaaccacgattggcgaagcgccgtcatttcggagcgactcagcgcctgcccgccctctcgccgcgtcgccggtgcctgcgcctcccgctccacctcgcttcttctctcccggccgaggcccgggggaccagagcgagaagcggggaccatgttccgacgcaagttgacggctctcgactaccacaaccccgccggcttcaactgcaaagatgaaacagaatttagaaacttcatcgtttggcttgaagaccagaaaatcaggcactacaagattgaagacagagggaatttaagaaacatccacagcagcgactggcccaagttctttgaaaagtatctcagagatgttaactgtcctttcaagattcaagatcgacaagaagctattgactggcttcttggtttagctgttagacttgaatatggagataatgctgaaaaatacaaggatttagtacctgataattcaaaaactgctgacaatgcaactaaaaatgcagaaccattgatcaatttggatgtaaataatcctgattttaaggctggtgtgatggctttggctaacctgcttcagattcagcgtcatgatgattacctggtaatgcttaaggcaattcggattttggttcaggagcgcctgacacaggatgcagttgctaaggcaaatcaaacaaaagagggcttacctgttgctttagacaaacatattcttggttttgacacaggagatgcagttcttaatgaagctgctcaaattctgcgattgctgcacatagaggagctcagagagctacagacaaaaatcaacgaagccatagtagctgttcaggcaattattgctgatccaaagacagaccacagactgggaaaagttggaagatgaacacttgaggacttcagcttctcacctacttagtacagttgggaaccatacacttctggcatgtttggaaatcaaaatgtcacattctcgggggaggaagcccagaaaattgggtatgttctagagatttaccaccattgcttattgcttttttctttaataaagtttaggaaagtagaaaaaaagtgagttggaaaaaaaagtcgaaa

SEQ ID NO: 94 - DNA, 3304 bp, Homo sapiens
gcgaccgaacgcggcggtcggcagcgttcgcgcgggggcctgcgaagcgctgctcggggccggcactgcccgcggggaggacgcgccgccgccgccacccagcgccgccgccgccgccgcctccagccgggccgccgcgcgtcccgggggccggccccgcgagcgcaggagtaaacaccgccggagtcttggagccgctgcagaagggaataaagagagatgcagggatttgtgaggttacggcgccccagctgcaagatgcactagccggctgaacccgggatcggctgacttgttggaaccggagtgctctgcacggagagtggtggatgagttgaagttgccttcccggggctcattttccacgctgccgagaggaatccgagaggcaaggcaatcacttcgtcttgccattgattgggtatcgggagctttttttttctcccctctctctttcttttcctccgtcttgttgcatgcaagaaaattacagtccgctgctcgcccgccctgggtgcgagatattcagccccgctctctcccgtgcattgtgcaacccaaagatgaaagaccgaaggggagaaagttaaagaaatcgcccacatgcgctggatcagtccacggcttggggaaaggcatccagagaaggtgggagcggagagtttgaagtctttacaggcgggaagatggcggactggagctgaaagtgttgattgggaaacttgggtgattcttgtgtttatttacaatcctcttgacccaggcaggacacatgcaggccaaaaaacgctatttcatcctgctctcagctggctcttgtctcgcccttttgttttatttcggaggcttgcagtttagggcatcgaggagccacagccggagagaagaacacagcggtaggaatggcttgcaccaccccagtccggatcatttctggccccgcttcccggagcctctgcgccccttcgttccttgggatcaattggaaaacgaggattccagcgtgcacatttccccccggcagaagcgagatgccaactccagcatctacaaaggcaagaagtgccgcatggagtcctgcttcgatttcaccctttgcaagaaaaacggcttcaaagtctacgtatacccacagcaaaaaggggagaaaatcgccgaaagttaccaaaacattctagcggccatcgagggctccaggttctacacctcggaccccagccaggcgtgcctctttgtcctgagtctggatactttagacagagaccagttgtcacctcagtatgtgcacaatttgagatccaaagtgcagagtctccacttgtggaacaatggtaggaatcatttaatttttaatttatattccggcacttggcctgactacaccgaggacgtggggtttgacatcggccaggcgatgctggccaaagccagcatcagtactgaaaacttccgacccaactttgatgtttctattcccctcttttctaaggatcatcccaggacaggaggggagagggggtttttgaagttcaacaccatccctcctctcaggaagtacatgctggtattcaaggggaagaggtacctgacagggataggatcagacaccaggaatgccttatatcacgtccataacggggaggacgttgtgctcctcaccacctgcaagcatggcaaagactggcaaaagcacaaggattctcgctgtgacagagacaacaccgagtatgagaagtatgattatcgggaaatgctgcacaatgccactttctgtctggttcctcgtggtcgcaggcttgggtccttcagattcctggaggctttgcaggctgcctgcgtccctgtgatgctcagcaatggatgggagttgccattctctgaagtgattaattggaaccaagctgccgtcataggcgatgagagattgttattacagattccttctacaatcaggtctattcatcaggataaaatcctagcacttagacagcagacacaattcttgtgggaggcttatttttcttcagttgagaagattgtattaactacactagagattattcaggacagaatattcaagcacatatcacgtaacagtttaatatggaacaaacatcctggaggattgttcgtactaccacagtattcatcttatctgggagattttccttactactatgctaatttaggtttaaagcccccctccaaattcactgcagtcatccatgcggtgacccccctggtctctcagtcccagccagtgttgaagcttctcgtggctgcagccaagtcccagtactgtgcccagatcatagttctatggaattgtgacaagcccctaccagccaaacaccgctggcctgccactgctgtgcctgtcgtcgtcattgaaggagagagcaaggttatgagcagccgttttctgccctacgacaacatcatcacagacgccgtgctcagccttgacgaggacacggtgctttcaacaacagaggtggatttcgccttcacagtgtggcagagcttccctgagaggattgtggggtaccccgcgcgcagccacttctgggataactctaaggagcggtggggatacacatcaaagtggacgaacgactactccatggtgttgacaggagctgctatttaccacaaatattatcactacctatactcccattacctgccagccagcctgaagaacatggtggaccaattggccaattgtgaggacattctcatgaacttcctggtgtctgctgtgacaaaattgcctccaatcaaagtgacccagaagaagcagtataaggagacaatgatgggacagacttctcgggcttcccgttgggctgaccctgaccactttgcccagcgacagagctgcatgaatacgtttgccagctggtttggctacatgccgctgatccactctcagatgaggctcgaccccgtcctctttaaagaccaggtctctattttgaggaagaaataccgagacattgagcgactttgaggaatccggctgagtgggggaggggaagcaagaagggatgggggtcaagctgctctctcttcccagtgcagatccactcatcagcagagccagattgtgccaactatccaaaaacttagatgagcagaatgacaaaaaaaaaaaaggccaatgagaactcaactcctggctcctgggactgcaccagactgctccaaactcacctcactggcttctgtgtcccaagactaggttggtacagtttaattatggaacattaaataattatttttgaaaaaaaaaaaaaaaaaa

SEQ ID NO: 95 - DNA, 5185 bp, Homo sapiens
aaaccctgttcttgggtgggtgtgggtataatactaagttgagatgatatcatttacgggggaaggcgctttgtgaagtaggccttatttctcttgtcctttcgtacagggaggaatttgaagtagatagaaaccgacctggattactccggtctgaactcagatcacgtaggactttaatcgttgaacaaacgaacctttaatagcggctgcaccattgggatgtcctgatccaacatcgaggtcgtaaaccctattgttgatatggactctagaataggattgcgctgttatccctagggtaacttgttccgttggtcaagttattggatcaattgagtatagtagttcgctctgactggtgaagtcttagcatgtactgctcggaggttgggttctgctccgaggtcgccccaaccgaaatttttaatgcaggtttggtagtttagggcctgtgggtttgttaggtactgtttgcattaataaattaaagctccatagggtcttctcgtcttgctgtgtcatgcccgcctcttcacgggcaggtcaatttcactggttaaaagtaagagacagctgtaccctcgtggagccattcatacaggtccctagttaaggaacaagtgattatgctacctttgcacggttagggtaccgcggccgttaaacatgtgtcactgggcaggcggtgcccctaatactggtgatgctagaggtgatgtttttggtaaacaggcggggtaagatttgccgagttccttttactttttttaacctttccttatgagcatgcctgtgttgggttgacagtgagggtaataatgacttgttggttgattgtagatattgggctgttaattgtcagttcagtgttttaatctgacgcaggcttatgcggaggagaatgttttcatgttacttatactaacattagttcttctatagggtgatagattggtccaattgggtgtgaggagttcagttatatgtttgggattttttaggtagtgggtgttgagcttgaacgctttcttaattggtggctgcttttaggcctactatgggtgttaaattttttactctctctacaaggttttttcctagtgtccaaagagctgttcctctttggactaatagttaaatttacaaggggatttagagggttctgtgggcaaatttaaagttgaactaagattctatcttggacaaccagctatcaccaggctcggtaggtttgtcgcctctacctataaatcttcccactattttgctaaaaaccctgttcttgggtgggtgtgggtataatactaagttgagatgatatcatttacgggggaaggcgctttgtgaagtaggccttatttctcttgtcctttcgtacagggaggaatttgaagtagatagaaaccgacctggattactccggtctgaactcagatcacgtaggactttaatcgttgaacaaacgaacctttaatagcggctgcaccattgggatgtcctgatccaacatcgaggtcgtaaaccctattgttgatatggactctagaataggattgcgctgttatccctagggtaacttgttccgttggtcaagttattggatcaattgagtatagtagttcgctctgactggtgaagtcttagcatgtactgctcggaggttgggttctgctccgaggtcgccccaaccgaaatttttaatgcaggtttggtagtttagggcctgtgggtttgttaggtactgtttgcattaataaattaaagctccatagggtcttctcgtcttgctgtgtcatgcccgcctcttcacgggcaggtcaatttcactggttaaaagtaagagacagctgtaccctcgtggagccattcatacaggtccctagttaaggaacaagtgattatgctacctttgcacggttagggtaccgcggccgttaaacatgtgtcactgggcaggcggtgcccctaatactggtgatgctagaggtgatgtttttggtaaacaggcggggtaagatttgccgagttccttttactttttttaacctttccttatgagcatgcctgtgttgggttgacagtgagggtaataatgacttgttggttgattgtagatattgggctgttaattgtcagttcagtgttttaatctgacgcaggcttatgcggaggagaatgttttcatgttacttatactaacattagttcttctatagggtgatagattggtccaattgggtgtgaggagttcagttatatgtttgggattttttaggtagtgggtgttgagcttgaacgctttcttaattggtggctgcttttaggcctactatgggtgttaaattttttactctctctacaaggttttttcctagtgtccaaagagctgttcctctttggactaatagttaaatttacaaggggatttagagggttctgtgggcaaatttaaagttgaactaagattctatcttggacaaccagctatcaccaggctcggtaggtttgtcgcctctacctataaatcttcccactattttgctaaaagagcacacccgtctatgtacggaattccgggaagaacttaagcgacaatcttgaacaccccttctcatgtgatgtgaaatgaaaccatttggaaaagtttcttctagccagtaatagattttttttttaattgctctgccttgtgccgagagatgttcttttaagatgaatcttttgatgtctgataccaccaaatataggtggtagggagagttggaggctggccctttgagcaggccattagcttacttgctgggcatttccgatagcttattgcctacccttttgctggaaacaagctgatttgaaaaaccaaatctatgaagactgcagctaaggattttatcggtagacttaagagcttttgtccttgtggatattttagtggaaccacatcagtctcaatactgtcattttacactgactcagagcagctgacttcattccttgccacgatatatatttaaggcaggcattgtaacagacataaagacaacttatctgtttcagcaggaaggattcagtttatgaactctcagaccagatcatgttgaacaaggagactttgatgtgtgtcatgaggaaactcattctttacttcccagtcaatttaaaggccagctatcctgagctactcgaatgaatgcactggttaaacattggaaatagtttgtttatatccttgtctctctctaggccaattgtgattacatgactcgactctacatctcgtcaaacaaggcctaggtctggttgctgtagactgctcgccctcaacaaataaaatctggttgactagcctccttgtatatacaactattatttgttaagaagaaattatcgtcaattttctactaccttccaattgtcagctctttttttcctctctggtttttcctacactttacagaaaaagacattgatctatactgccattccctctaatcctgccatactcagtcaaaaggaatgacttaagatgaagatgatcatctgctcgagtcaaaatatacattgtatataagaattggtgattagaaaagcaaaaaacctaaaacttaaatctaggagtctgtatactgtctccatgtctccatgcctcagatctcatctaaatctttgaacagcaccattcaaccaatctgaggccttgacttgcttgtaagatgattctcagagatcggctgagttaaaaaagatgacgacttgattaccaaagaaagtagggccaactttgacaaatctggctctgctgaccctgtcactcccagatgtagcatagactcctaaacagaacctcaagtctgattgaggataaggccttctcctgagctgaaagttctttggcagatgagcaagaaactgaaagctgatgtacctgactggctctgtaagatcagaaaactgtatccagaataagccctatggattaacccctgagtacccagagtaaaaactaatttacagaacttccttattgatctgctggttcttccagatcatattctggctattggtatggctggcctttctgaaggtaccctgcttgtctattttcctgactcagctcttgcctgcctttttcacatgttgctgcaattagactcaccgtgaggactacagtcaatttcagtctatcttgtgcccaatacaacaaggatttttaatagtaacaacccacacctcacccactaggactcaatgttcacaacaggaaggaccattgctgcatactccttgaccagcaacttttttgaagatatttttaagtgcagagtaggcctctattcctgtatgtaattgttcattttcagcacctggaacctcatctatcgggtctggaaggaatacagcagttcgaaagccgcgtccatttctctccttcagtagtgcagaaatgagtccgattcaccagtacacacagaactgtaccagttcaacctagcaaaagaagaaaagtttccactgtacttaaaatttacagctgactcaaattgcctcacagaattacttgatgtagaaggctagtcgtcttacttcggatcagcaggacagttgggctctcagactcatgaccactgagtttgcttgtgttgaaactgtggtttcatccaacatatgctattggacatgattattattccattcaaatggattacagacttcttgaggacaggacaaacttatctctcatggtgtttttttagaatacttttataaccaaggaagaaaccatgccagctgttaccattcaacttcttaagcagagattaagctttttcatatctgttcttatcctggacatcagtagtttttaattgcccagcatccgttccatcttgtaacaactccctgatgtttcttaaaaccacctcttcctattttcagtctgtggtttggacagtctgacccaaccttgagctttgtgggtgaacatgtaattcagacctcatcaatcagcaaatccatctgaactgtggaggagaagctctctttactgagggtgctttagctttgtaggatgaaaacctcaaactaacagggcctaccatgtagagaatgaagccagtgcaggggaaagcagagccaaaatatggagagacttgaatcctgatgacagcgtttgtgcccctgg

SEQ ID NO: 96 - DNA, 1976 bp, Homo sapiens
gccacacggtctttgagctgagtcgaggtggaccctttgaacgcagtcgccctacagccgctgattccccccgcatcgcctcccgtggaagcccaggcccgcttcgcagctttctccctttgtctcataaccatgtccaccaacgagaatgctaatacaccagctgcccgtcttcacagattcaagaacaagggaaaagacagtacagaaatgaggcgtcgcagaatagaggtcaatgtggagctgaggaaagctaagaaggatgaccagatgctgaagaggagaaatgtaagctcatttcctgatgatgctacttctccgctgcaggaaaaccgcaacaaccagggcactgtaaattggtctgttgatgacattgtcaaaggcataaatagcagcaatgtggaaaatcagctccaagctactcaagctgccaggaaactactttccagagaaaaacagccccccatagacaacataatccgggctggtttgattccgaaatttgtgtccttcttgggcagaactgattgtagtcccattcagtttgaatctgcttgggcactcactaacattgcttctgggacatcagaacaaaccaaggctgtggtagatggaggtgccatcccagcattcatttctctgttggcatctccccatgctcacatcagtgaacaagctgtctgggctctaggaaacattgcaggtgatggctcagtgttccgagacttggttattaagtacggtgcagttgacccactgttggctctccttgcagttcctgatatgtcatctttagcatgtggctacttacgtaatcttacctggacactttctaatctttgccgcaacaagaatcctgcacccccgatagatgctgttgagcagattcttcctaccttagttcggctcctgcatcatgatgatccagaagtgttagcagatacctgctgggctatttcctaccttactgatggtccaaatgaacgaattggcatggtggtgaaaacaggagttgtgccccaacttgtgaagcttctaggagcttctgaattgccaattgtgactcctgccctaagagccatagggaatattgtcactggtacagatgaacagactcaggttgtgattgatgcaggagcactcgccgtctttcccagcctgctcaccaaccccaaaactaacattcagaaggaagctacgtggacaatgtcaaacatcacagccggccgccaggaccagatacagcaagttgtgaatcatggattagtcccattccttgtcagtgttctctctaaggcagattttaagacacaaaaggaagctgtgtgggccgtgaccaactataccagtggtggaacagttgaacagattgtgtaccttgttcactgtggcataatagaaccgttgatgaacctcttaactgcaaaagataccaagattattctggttatcctggatgccatttcaaatatctttcaggctgctgagaaactaggtgaaactgagaaacttagtataatgattgaagaatgtggaggcttagacaaaattgaagctctacaaaaccatgaaaatgagtctgtgtataaggcttcgttaagcttaattgagaagtatttctctgtagaggaagaggaagatcaaaacgttgtaccagaaactacctctgaaggctacactttccaagttcaggatggggctcctgggacctttaacttttagatcatgtagctgagacataaatttgttgtgtactacgtttggtattttgtcttattgtttctctactaagaactctttcttaaatgtggtttgttactgtagcactttttacactgaaactatacttgaacagttccaactgtacatacatactgtatgaagcttgtcctctgactaggtttctaatttctatgtggaatttcctatcttgcagcatcctgtaaataaacattcaagtccacccttaaaaaaaa

SEQ ID NO: 97 - DNA, 691 bp, Homo sapiens
cccgcgcaggcgcagacggggaagcggagccaacatgccagtggcccggagctgggtttgtcgcaaaacttatgtgaccccgcggagacccttcgagaaatctcgtctcgaccaagagctgaagctgatcggcgagtatgggctccggaacaaacgtgaggtctggagggtcaaatttaccctggccaagatccgcaaggccgcccgggaactgctgacgcttgatgagaaggacccacggcgtctgttcgaaggcaacgccctgctgcggcggctggtccgcattggggtgctggatgagggcaagatgaagctggattacatcctgggcctgaagatagaggatttcttagagagacgcctgcagacccaggtcttcaagctgggcttggccaagtccatccaccacgctcgcgtgctgatccgccagcgccatatcagggtccgcaagcaggtggtgaacatcccgtccttcattgtccgcctggattcccagaagcacatcgacttctctctgcgctctccctacgggggtggccgcccgggccgcgtgaagaggaagaatgccaagaagggccagggtggggctggggctggagacgacgaggaggaggattaagtccacctgtccctcctgggctgctggattgtctcgttttcctgccaaataaacaggatcagcgctttaaaa

SEQ ID NO: 98 - DNA, 2120 bp, Homo sapiens
cgcattgtggtccgcttctctgcactatgtcgggtggcctcctgaaggcgctgcgcagcgactcctacgtggagctgagccagtaccgggaccagcacttccggggtgacaatgaagaacaagaaaaattactgaagaaaagctgtacgttatatgttggaaatctttctttttacacaactgaagaacaaatctatgaactcttcagcaaaagtggtgacataaagaaaatcattatgggtctggataaaatgaagaaaacagcatgtggattctgttttgtggaatattactcacgcgcagatgcggaaaacgccatgcggtacataaatgggacgcgtctggatgaccgaatcattcgcacagactgggacgcaggctttaaggagggcaggcaatacggccgtgggcgatctgggggccaggttcgggatgagtatcggcaggactacgatgctgggagaggaggctatggaaaactggcacagaaccagtgagtggtgagagctctgtcagtgacaaacactcctttggcctgttgaatttgctgaagaacatcacctaaagtctgcacacgagcccatttttaccaagatttgatcagtgtctttactgagctggaagcctctgaaagttattaaaggacagaatccaaaagaatgcctttaattcttgtctgagaatcttggccatgtgtcagattatcagaacaattttgttaccaggtcagaaattgtgttctttgacaacagattggatctgtaatgttgattagtctttagccataaccactacacttttagaaagacagaaaaatgtaagaatttgtttttaccataatgagtcttaagtaggttcatgatctacattggggcctgggattatttttttaattttaagtttgcatgagatagcctaataaatggaggtggggccaggcatggtggctcacacgtgtaatcccaacactttgggaggctgaggaggaaggatagcttgaggccaggagtttgagactagactgggcaacatagcaagaccccgtctctacaaagcacaacgaaaaacaacaaatggagttgtgctatgttgtattgctttgcacaaaattaggaacaggtgtttgacaattgaatttgttttctgtgaattctaacctctaaaggcatgcttagaggtcaaggaccttcctgtgtagttggtgcaaaagcaatctccacaggacagcactgcttccatgcttcatacatcaggaaatgaggccagaacttgagtatttactaacacgtttttcaaaagatgtcagtgttatacctaaagctaaaaaaaagcaagggtttgtcatagagggaacctctaaataatttcaggggtaggggagatgttgtcaataggaaatgggataaaatatcaagagacaatgaaaacactgccttgacatgaggaccagcaagtttattcttttcattttcagtgatgttgggaatggactgggttttaaaagggagcttgaagagggaatgtttgacagtcacagaaggttcctgcagcagatgcctcttttagccatttctcatttttttcctcaaattttacctactgaggctcaagccttcacagtgagctgatggtctctacagggaggggagtctagggaatttatttggtatttgtaaggcaagaggtgatttctctctaatatatctgagttattgctcatttaaaactgttaagtccagtataattttccctgatatgaaaaaatgtgcatttttttcacttagcaacaaagtaccttctaatttccaatagtccgtgaaagttggggctgaagtacctaagtgtgaatgtctctcccgttaaactgagtgtagaaatctgaatttttaaaagagctgtaactagttgtaagtgcttaggaagaaactttgcaaacatttaatgaggatacactgttcatttttaaaattccttcacactgtaatttaatgtgttttatattcttttgtagtaaaacaacataactcagatttctacaggagacagtggttttatttggattgtcttctgtaataggtttcaataaagctggatgaacttaaaaaaaaaaaaaaaaaaaa

SEQ ID NO: 99 - DNA, 954 bp, Homo sapiens
aataggtttggtcctagcctttctattagctcttagtaagattacacatgcaagcatccccgttccagtgagttcaccctctaaatcaccacgatcaaaagggacaagcatcaagcacgcagcaatgcagctcaaaacgcttagcctagccacacccccacgggaaacagcagtgattaacctttagcaataaacgaaagtttaactaagctatactaaccccagggttggtcaatttcgtgccagccaccgcggtcacacgattaacccaagtcaatagaagccggcgtaaagagtgttttagatcaccccctccccaataaagctaaaactcacctgagttgtaaaaaactccagttgacacaaaatagactacgaaagtggctttaacatatctgaacacacaatagctaagacccaaactgggattagataccccactatgcttagccctaaacctcaacagttaaatcaacaaaactgctcgccagaacactacgagccacagcttaaaactcaaaggacctggcggtgcttcatatccctctagaggagcctgttctgtaatcgataaaccccgatcaacctcaccacctcttgctcagcctatataccgccatcttcagcaaaccctgatgaaggctacaaagtaagcgcaagtacccacgtaaagacgttaggtcaaggtgtagcccatgaggtggcaagaaatgggctacattttctaccccagaaaactacgatagcccttatgaaacttaagggtcgaaggtggatttagcagtaaactaagagtagagtgcttagttgaacagggccctgaagcgcgtacacaccgcccgtcaccctcctcaagtatacttcaaaggacatttaactaaaacccctacgcatttatatagaggagacaagtcgtaacatggtaagtgtactggaaagtgcacttggacgaac

SEQ ID NO: 100 - DNA, 681 bp, Homo sapiens
atgaacgaaaatctgttcgcttcattcattgcccccacaatcctaggcctacccgccgcagtactgatcattctatttccccctctattgatccccacctccaaatatctcatcaacaaccgactaatcaccacccaacaatgactaatcaaactaacctcaaaacaaatgataaccatacacaacactaaaggacgaacctgatctcttatactagtatccttaatcatttttattgccacaactaacctcctcggactcctgcctcactcatttacaccaaccacccaactatctataaacctagccatggccatccccttatgagcgggcgcagtgattataggctttcgctctaagattaaaaatgccctagcccacttcttaccacaaggcacacctacaccccttatccccatactagttattatcgaaaccatcagcctactcattcaaccaatagccctggccgtacgcctaaccgctaacattactgcaggccacctactcatgcacctaattggaagcgccaccctagcaatatcaaccattaaccttccctctacacttatcatcttcacaattctaattctactgactatcctagaaatcgctgtcgccttaatccaagcctacgttttcacacttctagtaagcctctacctgcacgacaacacataa

SEQ ID NO: 101 - DNA, 3612 bp, Homo sapiens
gaggaagtgggacctccccttttgggtcggtagttcagcgccggcgccggtgtgcgagccgcggcagagtgaggcaggcaacccgaggtgcggagcgacctgcggaggctgagccccgctttctcccagggtttcttatcagccagccgccgctgtccccgggggagtaggaggctcctgacaggccgcggctgtctgtgtgtccttctgagtgtcagaggaacggccagaccccgcgggccggagcagaacgcggccagggcagaaagcggcggcaggagaagcaggcagggggccggaggacgcagaccgagacccgaggcggaggcggaccgcgagccggccatgtcggtggtggggttggacgtgggctcgcagagctgctacatcgcggtagcccgggccgggggcatcgagaccatcgccaatgagttcagcgaccggtgcaccccgtcagtcatatcatttggatcaaaaaatagaacaatcggagttgcagccaaaaatcagcaaatcactcatgcaaacaatacggtgtctaacttcaaaagatttcatggccgagcattcaacgaccccttcattcaaaaggagaaggaaaacttgagttacgatttggttccattgaaaaatggtggagttggaataaaggtaatgtacatgggtgaagaacatctatttagtgtggagcagataacagccatgttgttgactaagctgaaggaaactgctgaaaacagcctcaagaaaccagtaacagattgtgttatttcagtcccctccttctttacagatgctgagaggcgatctgtgttagatgctgcacagattgttggcctaaactgtttaagacttatgaatgacatgacagctgttgctttgaattacggaatttataagcaggatctcccaagcctggatgagaaacctcggatagtggtttttgttgatatgggacattcagcttttcaagtgtctgcttgtgcttttaacaagggaaaattgaaggtactgggaacagcttttgatcctttcttaggaggaaaaaacttcgatgaaaagttagtggaacatttctgtgcagaatttaaaactaagtacaagttggatgcaaaatccaaaatacgagcactcctacgtctgtatcaggaatgtgaaaaactgaaaaagctaatgagctctaacagcacagaccttccactgaatatcgaatgctttatgaatgataaagatgtttccggaaagatgaacaggtcacaatttgaagaactctgtgctgaacttctgcaaaagatagaagtacccctttattcactgttggaacaaactcatctcaaagtagaagatgtgagtgcagttgagattgttggaggcgctacacgaattccagctgtgaaggaaagaattgccaaattctttggaaaagatattagcacaacactcaatgcagatgaagcagtagccagaggatgtgcattacagtgtgcaatactttccccggcatttaaagttagagaattttccgtcacagatgcagttccttttccaatatctctgatctggaaccatgattcagaagatactgaaggtgttcatgaagtctttagtcgaaaccatgctgctcctttctccaaagttctcacctttctgagaagggggccttttgagctagaagctttctattctgatccccaaggagttccatatccagaagcaaaaataggccgctttgtagttcagaatgtttctgcacagaaagatggagaaaaatctagagtaaaagtcaaagtgcgagtcaacacccatggcattttcaccatctctacggcatctatggtggagaaagtcccaactgaggagaatgaaatgtcttctgaagctgacatggagtgtctgaatcagagaccaccagaaaacccagacactgataaaaatgtccagcaagacaacagtgaagctggaacacagccccaggtacaaactgatgctcaacaaacctcacagtctcccccttcacctgaacttacctcagaagaaaacaaaatcccagatgctgacaaagcaaatgaaaaaaaagttgaccagcctccagaagctaaaaagcccaaaataaaggtggtgaatgttgagctgcctattgaagccaacttggtctggcagttagggaaagaccttcttaacatgtatattgagacagagggtaagatgataatgcaagataaattggaaaaagaaaggaatgatgctaaaaatgcagttgaggaatatgtgtatgagttcagagacaagctgtgtggaccatatgaaaaatttatatgtgagcaggatcatcaaaattttttgagactcctcacagaaactgaagactggctgtatgaagaaggagaggaccaagctaaacaagcatatgttgacaagttggaagaattaatgaaaattggcactccagttaaagttcggtttcaggaagctgaagaacggccaaaaatgtttgaagaactaggacagaggctgcagcattatgccaagatagcagctgacttcagaaataaggatgagaaatacaaccatattgatgagtctgaaatgaaaaaagtggagaagtctgttaatgaagtgatggaatggatgaataatgtcatgaatgctcaggctaaaaagagtcttgatcaggatccagttgtacgtgctcaggaaattaaaacaaaaatcaaggaattgaacaacacatgtgaacccgttgtaacacaaccgaaaccaaaaattgaatcacccaaactggaaagaactccaaatggcccaaatattgataaaaaggaagaagatttagaagacaaaaacaattttggtgctgaacctccacatcagaatggtgaatgttaccctaatgagaaaaattctgttaatatggacttggactagataaccttaaattggcctattccttcaattaataaaatatttttgccatagtatgtgactctacataacatactgaaactatttatattttcttttttaaggatatttagaaattttgtgtattatatggaaaaagaaaaaaagcttaagtctgtagtctttatgatcctaaaagggaaaattgccttggtaactttcagattcctgtggaattgtgaattcatactaagctttctgtgcagtctcaccatttgcatcactgaggatgaaactgacttttgtcttttggagaaaaaaaactgtactgttgttcaagagggctgtgattaaaatctttaagcatttgttcctgccaaggtagttttcttgcattttgctctccattcagcatgtgtgtgggtgtggatgtttataaacaagactaagtctgacttcataagggctttctaaaaccatttctgtccaagagaaaatgactttttgctttgatattaaaaattcaatgagtaaaacaaaagctagtcaaatgtgttagcagcatgcagaacaaaaactttaaactttctctctcactatacagtatattgtcaatgtgaaagtgtggaatggaagaaatgtcgatcctgttgtaactgattgtgaacacttttatgagctttaaaataaagttcatcttatggtgtcatttct

SEQ ID NO: 102 - DNA, 3096 bp, Homo sapiens
ggcacgaggccccttttccagaatcacttgcactgtcttgttcttgaatgagaaaggaagaaaagagcctcccattactcagacccgtgtaaacattattccccccaggagaaaatggtgttattcaaatgaatcataataaaatagcctctaaacagtttctaagcgggagcctccgtggaactcagcgctccgctcctcccagttcctaagaggtcccgggattcttgagctgtgcccagctgacgagcttttgaagatggcacaataaccgtccagtgatgcctgaccatgacagcacagccctcttaagccggcaaaccaagaggagaagagttgacattggagtgaaaaggacggtagggacagcatctgcattttttgctaaggcaagagcaacgttttttagtgccatgaatccccaaggttctgagcaggatgttgagtattcagtggtgcagcatgcagatggggaaaagtcaaatgtactccgcaagctgctgaagagggcgaactcgtatgaagatgccatgatgccttttccaggagcaaccataatttcccagctgttgaaaaataacatgaacaaaaatggtggcacggagcccagtttccaagccagcggtctctctagtacaggctccgaagtacatcaggaggatatatgcagcaactcttcaagagacagccccccagagtgtctttccccttttggcaggcctactatgagccagtttgatatggatcgcttatgtgatgagcacctgagagcaaagcgcgcccgggttgagaatataattcggggtatgagccattcccccagtgtggcattaaggggcaatgaaaatgaaagagagatggccccgcagtctgtgagtccccgagaaagttacagagaaaacaaacgcaagcaaaagcttccccagcagcagcaacagagtttccagcagctggtttcagcccgaaaagaacagaagcgagaggagcgccgacagctgaaacagcagctggaggacatgcagaaacagctgcgccagctgcaggaaaagttctaccaaatctatgacagcactgattcggaaaatgatgaagatggtaacctgtctgaagacagcatgcgctcggagatcctggatgccagggcccaggactctgtcggaaggtcagataatgagatgtgcgagctagacccaggacagtttattgaccgagctcgagccctgatcagagagcaggaaatggctgaaaacaagccgaagcgagaaggcaacaacaaagaaagagaccatgggccaaactccttacaaccggaaggcaaacatttggctgagaccttgaaacaggaactgaacactgccatgtcgcaagttgtggacactgtggtcaaagtcttttcggccaagccctcccgccaggttcctcaggtcttcccacctctccagatcccccaggccagatttgcagtcaatggggaaaaccacaatttccacaccgccaaccagcgcctgcagtgctttggcgacgtcatcattccgaaccccctggacacctttggcaatgtgcagatggccagttccactgaccagacagaagcactgcccctggttgtccgcaaaaactcctctgaccagtctgcctccggccctgccgctggcggccaccaccagcccctgcaccagtcgcctctctctgccaccacgggcttcaccacgtccaccttccgccaccccttcccccttccctgatggcctatccatttcagagcccattaggtgctccctccggctccttctctggaaaagacagagcctctcctgaatccttagacttaactagggataccacgagtctgaggaccaagatgtcatctcaccacctgagccaccacccttgttcaccagcacacccgcccagcaccgccgaagggctctccttgtcgctcataaagtccgagtgcggcgatcttcaagatatgtctgaaatatcaccttattcgggaagtgcaatgcaggaaggattgtcacccaatcacttgaaaaaagcaaagctcatgtttttttatacccgttatcccagctccaatatgctgaagacctacttctccgacgtaaagttcaacagatgcattacctctcagctcatcaagtggtttagcaatttccgtgagttttactacattcagatggagaagtacgcacgtcaagccatcaacgatggggtcaccagtactgaagagctgtctataaccagagactgtgagctgtacagggctctgaacatgcactacaataaagcaaatgactttgaggttccagagagattcctggaagttgctcagatcacattacgggagtttttcaatgccattatcgcaggcaaagatgttgatccttcctggaagaaggccatatacaaggtcatctgcaagctggatagtgaagtccctgagattttcaaatccccgaactgcctacaagagctgcttcatgagtagaaatttcaacaactctttttgaatgtatgaagagtagcagtcccctttggatgtccaagttatatgtgtctagattttgatttcatatatatgtgtatgggaggcatggatatgttatgaaatcagctggtaattcctcctcatcacgtttctctcattttcttttgttttccattgcaaggggatggttgttttctttctgcctttagtttgcttttgcccaaggcccttaacatttggacacttaaaatagggttaattttcagggaaaaagaatgttggcgtgtgtaaagtctctattagcaatgaagggaatttgttaacgatgcatccacttgattgatgacttattgcaaatggcggttggctgaggaaaacccatgacacagcacaactctacagacagtgatgtgtctcttgtttctactgctaagaaggtctgaaaatttaatgaaaccacttcatacatttaagtattttgtttggtttgaactcaatcagtagcttttccttacatgtttaaaaataattccaatgacagatgagcagctcacttttccaaagtaccccaaaaggccaaattaaaaaaaaaaaaaaaaaaa

SEQ ID NO: 103 - DNA, 1793 bp, Homo sapiens
cgcgtccgccccgcgagcacagagcctcgcctttgccgatccgccgcccgtccacacccgccgccagctcaccatggatgatgatatcgccgcgctcgtcgtcgacaacggctccggcatgtgcaaggccggcttcgcgggcgacgatgccccccgggccgtcttcccctccatcgtggggcgccccaggcaccagggcgtgatggtgggcatgggtcagaaggattcctatgtgggcgacgaggcccagagcaagagaggcatcctcaccctgaagtaccccatcgagcacggcatcgtcaccaactgggacgacatggagaaaatctggcaccacaccttctacaatgagctgcgtgtggctcccgaggagcaccccgtgctgctgaccgaggcccccctgaaccccaaggccaaccgcgagaagatgacccagatcatgtttgagaccttcaacaccccagccatgtacgttgctatccaggctgtgctatccctgtacgcctctggccgtaccactggcatcgtgatggactccggtgacggggtcacccacactgtgcccatctacgaggggtatgccctcccccatgccatcctgcgtctggacctggctggccgggacctgactgactacctcatgaagatcctcaccgagcgcggctacagcttcaccaccacggccgagcgggaaatcgtgcgtgacattaaggagaagctgtgctacgtcgccctggacttcgagcaagagatggccacggctgcttccagctcctccctggagaagagctacgagctgcctgacggccaggtcatcaccattggcaatgagcggttccgctgccctgaggcactcttccagccttccttcctgggcatggagtcctgtggcatccacgaaactaccttcaactccatcatgaagtgtgacgtggacatccgcaaagacctgtacgccaacacagtgctgtctggcggcaccaccatgtaccctggcattgccgacaggatgcagaaggagatcactgccctggcacccagcacaatgaagatcaagatcattgctcctcctgagcgcaagtactccgtgtggatcggcggctccatcctggcctcgctgtccaccttccagcagatgtggatcagcaagcaggagtatgacgagtccggcccctccatcgtccaccgcaaatgcttctaggcggactatgacttagttgcgttacaccctttcttgacaaaacctaacttgcgcagaaaacaagatgagattggcatggctttatttgttttttttgttttgttttggttttttttttttttttggcttgactcaggatttaaaaactggaacggtgaaggtgacagcagtcggttggagcgagcatcccccaaagttcacaatgtggccgaggactttgattgcacattgttgtttttttaatagtcattccaaatatgagatgcattgttacaggaagtcccttgccatcctaaaagccaccccacttctctctaaggagaatggcccagtcctctcccaagtccacacaggggaggtgatagcattgctttcgtgtaaattatgtaatgcaaaatttttttaatcttcgccttaatacttttttattttgttttattttgaatgatgagccttcgtgcccccccttccccctttttgtcccccaacttgagatgtatgaaggcttttggtctccctgggagtgggtggaggcagccagggcttacctgtacactgacttgagaccagttgaataaaagtgcacacctta

SEQ ID NO: 104 - DNA, 556 bp, Homo sapiens
acaactcggtggtggccactgcgcagaccagacttcgctcgtactcgtgcgcctcgcttcgcttttcctccgcaaccatgtctgacaaacccgatatggctgagatcgagaaattcgataagtcgaaactgaagaagacagagacgcaagagaaaaatccactgccttccaaagaaacgattgaacaggagaagcaagcaggcgaatcgtaatgaggcgtgcgccgccaatatgcactgtacattccacaagcattgccttcttattttacttcttttagctgtttaactttgtaagatgcaaagaggttggatcaagtttaaatgactgtgctgcccctttcacatcaaagaactactgacaacgaaggccgcgctgcctttcccatctgtctatctatctggctggcagggaaggaaagaacttgcatgttggtgaaggaagaagtggggtggaagaagtggggtgggacgacagtgaaatctagagtaaaaccaagctggcccaagtgtcctgcaggctgtaatgcagtttaatcagagtgccattttttttt

SEQ ID NO: 105 - DNA, 1558 bp, Homo sapiens
gctaaacctagccccaaacccactccaccttactaccagacaaccttagccaaaccatttacccaaataaagtataggcgatagaaattgaaacctggcgcaatagatatagtaccgcaagggaaagatgaaaaattataaccaagcataatatagcaaggactaacccctataccttctgcataatgaattaactagaaataactttgcaaggagagccaaagctaagacccccgaaaccagacgagctacctaagaacagctaaaagagcacacccgtctatgtagcaaaatagtgggaagatttataggtagaggcgacaaacctaccgagcctggtgatagctggttgtccaagatagaatcttagttcaactttaaatttgcccacagaaccctctaaatccccttgtaaatttaactgttagtccaaagaggaacagctctttggacactaggaaaaaaccttgtagagagagtaaaaaatttaacacccatagtaggcctaaaagcagccaccaattaagaaagcgttcaagctcaacacccactacctaaaaaatcccaaacatataactgaactcctcacacccaattggaccaatctatcaccctatagaagaactaatgttagtataagtaacatgaaaacattctcctccgcataagcctgcgtcagattaaaacactgaactgacaattaacagcccaatatctacaatcaaccaacaagtcattattaccctcactgtcaacccaacacaggcatgctcataaggaaaggttaaaaaaagtaaaaggaactcggcaaatcttaccccgcctgtttaccaaaaacatcacctctagcatcaccagtattagaggcaccgcctgcccagtgacacatgtttaacggccgcggtaccctaaccgtgcaaaggtagcataatcacttgttccttaaatagggacctgtatgaatggctccacgagggttcagctgtctcttacttttaaccagtgaaattgacctgcccgtgaagaggcgggcatgacacagcaagacgagaagaccctatggagctttaatttattaatgcaaacagtacctaacaaacccacaggtcctaaactaccaaacctgcattaaaaatttcggttggggcgacctcggagcagaacccaacctccgagcagtacatgctaagacttcaccagtcaaagcgaactactatactcaattgatccaataacttgaccaacggaacaagttaccctagggataacagcgcaatcctattctagagtccatatcaacaatagggtttacgacctcgatgttggatcaggacatcccaatggtgcagccgctattaaaggttcgtttgttcaacgattaaagtcctacgtgatctgagttcagaccggagtaatccaggtcggtttctatctacttcaaattcctccctgtacgaaaggacaagagaaataaggcctacttcacaaagcgccttcccccgtaaatgatatcatctcaacttagtattatacccacacccacccaagaacagggttt

SEQ ID NO: 106 - DNA, 3727 bp, Homo sapiens
gtcgcggtgtgctaagcgaggagtccgagtgtgtgagcttgagagccgcgcgctagagcgacccggcgagggatggcggccaccgggaccgcggccgccgcagccacgggcaggctcctgcttctgctgctggtggggctcacggcgcctgccttggcgctggccggctacatcgaggctcttgcagccaatgccggaacaggatttgctgttgctgagcctcaaatcgcaatgttttgtgggaagttaaatatgcatgtgaacattcagactgggaaatgggaacctgatccaacaggcaccaagagctgctttgaaacaaaagaagaagttcttcagtactgtcaggagatgtatccagagctacagatcacaaatgtgatggaggcaaaccagcgggttagtattgacaactggtgccggagggacaaaaagcaatgcaagagtcgctttgttacacctttcaagtgtctcgtgggtgaatttgtaagtgatgtcctgctagttccagaaaagtgccagtttttccacaaagagcggatggaggtgtgtgagaatcaccagcactggcacacggtagtcaaagaggcatgtctgactcagggaatgaccttatatagctacggcatgctgctcccatgtggggtagaccagttccatggcactgaatatgtgtgctgccctcagacaaagattattggatctgtgtcaaaagaagaggaagaggaagatgaagaggaagaggaagaggaagatgaagaggaagactatgatgtttataaaagtgaatttcctactgaagcagatctggaagacttcacagaagcagctgtggatgaggatgatgaggatgaggaagaaggggaggaagtggtggaggaccgagattactactatgacaccttcaaaggagatgactacaatgaggagaatcctactgaacccggcagcgacggcaccatgtcagacaaggaaattactcatgatgtcaaagctgtctgctcccaggaggcgatgacggggccctgccgggccgtgatgcctcgttggtacttcgacctctccaagggaaagtgcgtgcgctttatatatggtggctgcggcggcaacaggaacaattttgagtctgaggattattgtatggctgtgtgtaaagcgatgattcctccaactcctctgccaaccaatgatgttgatgtgtatttcgagacctctgcagatgataatgagcatgctcgcttccagaaggctaaggagcagctggagattcggcaccgcaaccgaatggacagggtaaagaaggaatgggaagaggcagagcttcaagctaagaacctccccaaagcagagaggcagactctgattcagcacttccaagccatggttaaagctttagagaaggaagcagccagtgagaagcagcagctggtggagacccacctggcccgagtggaagctatgctgaatgaccgccgtcggatggctctggagaactacctggctgccttgcagtctgacccgccacggcctcatcgcattctccaggccttacggcgttatgtccgtgctgagaacaaagatcgcttacataccatccgtcattaccagcatgtgttggctgttgacccagaaaaggcggcccagatgaaatcccaggtgatgacacatctccacgtgattgaagaaaggaggaaccaaagcctctctctgctctacaaagtaccttatgtagcccaagaaattcaagaggaaattgatgagctccttcaggagcagcgtgcagatatggaccagttcactgcctcaatctcagagacccctgtggacgtccgggtgagctctgaggagagtgaggagatcccaccgttccaccccttccaccccttcccagccctacctgagaacgaagacactcagccggagttgtaccacccaatgaaaaaaggatctggagtgggagagcaggatgggggactgatcggtgccgaagagaaagtgattaacagtaagaataaagtggatgaaaacatggtcattgacgagactctggatgttaaggaaatgattttcaatgccgagagagttggaggcctcgaggaagagcgggaatccgtgggcccactgcgggaggacttcagtctgagtagcagtgctctcattggcctgctggtcatcgcagtggccattgccacggtcatcgtcatcagcctggtgatgctgaggaagaggcagtatggcaccatcagccacgggatcgtggaggttgatccaatgctcaccccagaagagcgtcacctgaacaagatgcagaaccatggctatgagaaccccacctacaaatacctggagcagatgcagatttaggtggcagggagcgcggcagccctggcggagggatgcaggtgggccggaagatcccacgattccgatcgactgccaagcagcagccgctgccaggggctgcgtctgacatcctgacctcctggactgtaggactatataaagtactactgtagaactgcaatttccattcttttaaatgggtgaaaaatggtaatataacaatatatgatatataaaccttaaatgaaaaaaatgatctattgcagatatttgatgtagttttcttttttaaattaatcagaaaccccacttccattgtattgtctgacacatgctctcaatatataataaatgggaaatgtcgattttcaataatagacttatatgcaggctgtcgttccggttatgttgtgtaagtcaactcttcagcctcattcactgtcctggcttttatttaaagaaaaaaaaggcagtattccctttttaaatgagctttcaggaagttgctgagaaatggggtggaatagggaactgtaatggccactgaagcacgtgagagaccctcgcaaaatgatgtgaaaggaccagtttcttgaagtccagtgtttccacggctggatacctgtgtgtctccataaaagtcctgtcaccaaggacgttaaaggcattttattccagcgtcttctagagagcttagtgtatacagatgagggtgtccgctgctgctttccttcggaatccagtgcttccacagagattagcctgtagcttatatttgacattcttcactgtctgttgtttacctaccgtagctttttaccgttcacttccccttccaactatgtccagatgtgcaggctcctcctctctggactttctccaaaggcactgaccctcggcctctactttgtcccctcacctccaccccctcctgtcaccggccttgtgacattcactcagagaagaccacaccaaggaggggccgcggctggcccaggagagaacacggggaggtttgtttgtgtgaaaggaaagtagtccaggctgtccctgaaactgagtctgtggacactgtggaaagctttgaacaattgtgttttcgtcacaggagtctttgtaatgcttgtacagttgatgtcgatgctcactgcttctgctttttctttctttttattttaaaaaatctgaaggttctggtaacctgtggtgtatttttattttcctgtgactgtttttgttttgtttttttcctttttcctcccctttagccctattcatgtctctacccactatgcacagattaaacttcacctacaaactccttaatatgatctgtggagaatgtacacagtttaaacacatcaataaatactttaacttccaa

SEQ ID NO: 107 - DNA, 3655 bp, Homo sapiens
ggcacgaggcgctaggtagagcgccgggacctgtgacagggctggtagcagcgcacaggaaaggcggcttttagccaggtatttcagtgtctgtagacaagatggaatcatctccatttaatagacggcaatggacctcactatcattgagggtaacagccaaagaactttctcttgtcaacaagaacaagtcatcggctattgtggaaatattctccaagtaccagaaagcagctgaagaaacaaacatggagaagaagagaagtaacaccgaaaatctctcccagcactttagaaaggggaccctgactgtgttaaagaagaagtgggagaacccagggctgggagcagagtctcacacagactctctacggaacagcagcactgagattaggcacagagcagaccatcctcctgctgaagtgacaagccacgctgcttctggagccaaagctgaccaagaagaacaaatccaccccagatctagactcaggtcacctcctgaagccctcgttcagggtcgatatccccacatcaaggacggtgaggatcttaaagaccactcaacagaaagtaaaaaaatggaaaattgtctaggagaatccaggcatgaagtagaaaaatcagaaatcagtgaaaacacagatgcttcgggcaaaatagagaaatataatgttccgctgaacaggcttaagatgatgtttgagaaaggtgaaccaactcaaactaagattctccgggcccaaagccgaagtgcaagtggaaggaagatctctgaaaacagctattctctagatgacctggaaataggcccaggtcagttgtcatcttctacatttgactcggagaaaaatgagagtagacgaaatctggaacttccacgcctctcagaaacctctataaaggatcgaatggccaagtaccaggcagctgtgtccaaacaaagcagctcaaccaactatacaaatgagctgaaagccagtggtggcgaaatcaaaattcataaaatggagcaaaaggagaatgtgcccccaggtcctgaggtctgcatcacccatcaggaaggggaaaagatttctgcaaatgagaatagcctggcagtccgttccacccctgccgaagatgactcccgtgactcccaggttaagagtgaggttcaacagcctgtccatcccaagccactaagtccagattccagagcctccagtctttctgaaagttctcctcccaaagcaatgaagaagtttcaggcacctgcaagagagacctgcgtggaatgtcagaagacagtctatccaatggagcgtctcttggccaaccagcaggtgtttcacatcagctgcttccgttgctcctattgcaacaacaaactcagtctaggaacatatgcatctttacatggaagaatctattgtaagcctcacttcaatcaactctttaaatctaagggcaactatgatgaaggctttgggcacagaccacacaaggatctatgggcaagcaaaaatgaaaacgaagagattttggagagaccagcccagcttgcaaatgcaagggagacccctcacagcccaggggtagaagatgcccctattgctaaggtgggtgtcctggctgcaagtatggaagccaaggcctcctctcagcaggagaaggaagacaagccagctgaaaccaagaagctgaggatcgcctggccaccccccactgaacttggaagttcaggaagtgccttggaggaagggatcaaaatgtcaaagcccaaatggcctcctgaagacgaaatcagcaagcccgaagttcctgaggatgtcgatctagatctgaagaagctaagacgatcttcttcactgaaggaaagaagccgcccattcactgtagcagcttcatttcaaagcacctctgtcaagagcccaaaaactgtgtccccacctatcaggaaaggctggagcatgtcagagcagagtgaagaatctgtgggtggaagagttgcagaaaggaaacaagtggaaaatgccaaggcttctaagaagaatgggaatgtgggaaaaacaacctggcaaaacaaagaatctaaaggagagacagggaagagaagtaaggaaggtcatagtttggagatggagaatgagaatcttgtagaaaatggtgcagactccgatgaagatgataacagcttcctcaaacaacaatctccacaagaacccaagtctctgaattggtcgagttttgtagacaacacctttgctgaagaattcactactcagaatcagaaatcccaggatgtggaactctgggagggagaagtggtcaaagagctctctgtggaagaacagataaagagaaatcggtattatgatgaggatgaggatgaagagtgacaaattgcaatgatgctgggccttaaattcatgttagtgttagcgagccactgccctttgtcaaaatgtgatgcacataagcaggtatcccagcatgaaatgtaatttacttggaagtaactttggaaaagaattccttcttaaaatcaaaaacaaaacaaaaaaacacaaaaaacacattctaaatactagagataactttacttaaattcttcattttagcagtgatgatatgcataagtgctgtaaggcttgtaactggggaaatattccacctgataatagcccagattctactgtattcccaaaaggcaatattaaggtagatagatgattagtagtatattgttacacactattttggaattagagaacatacagaaggaatttaggggcttaaacattacgactgaatgcactttagtataaagggcacagtttgtatatttttaaatgaataccaatttaattttttagtatttacctgttaagagattatttagtctttaaattttttaggttaattttcttgctgtgatatatatgaggaatttactactttatgtcctgctctctaaactacatcctgaactcgacgtcctgaggtataatacaacagagcactttttgaggcaattgaaaaaccaacctacactcttcggtgcttagagagatctgctgtctcccaaataagcttttgtatctgccagtgaatttactgtactccaaatgattgctttcttttctggtgatatctgtgcttctcataattactgaaagctgcaatattttagtaataccttcgggatcactgtcccccatcttccgtgttagagcaaagtgaagagtttaaaggaggaagaagaaagaactgtcttacaccacttgagctcagacctctaaaccctgtatttcccttatgatgtcccctttttgagacactaatttttaaatacttactagctctgaaatatattgatttttatcacagtattctcagggtgaaattaaaccaactataggcctttttcttgggatgattttctagtcttaaggtttggggacattataaacttgagtacatttgttgtacacagttgatattccaaattgtatggatgggagggagaggtgtcttaagctgtaggcttttctttgtactgcatttatagagatttagctttaatattttttagagatgtaaaacattctgctttcttagtcttacctagtctgaaacatttttattcaataaagattttaattaaaatttg

SEQ ID NO: 108 - DNA, 2995 bp, Homo sapiens
tgctaccgaaggccggcggccgcggagccctgcgagtaggcagcgttgggcccatgcaggacgcggagaacgtggcggtgcccgaggcggccgaggagcgcgccgagcccggccagcagcagccggccgccgagccgccgccagccgaggggctgctgcggcccgcggggcccggcgctccggaggccgcggggaccgaggcctccagtgaggaggtggggatcgcggaggccgggccggagcccgaggtgaggaccgagccggcggccgaggcagaggcggcctccggcccgtccgagtcgccctcgccgccggccgccgaggagctgcccgggtcgcatgctgagccccctgtcccggcacagggcgaggccccaggagagcaggctcgggacgcaggctccgacagccgggcccaggcggtgtccgaggacgcgggaggaaacgagggcagagcggccgaggccgaaccccgggcgctggagaacggcgacgcggacgagccctccttcagcgaccccgaggacttcgtggacgacgtgagcgaggaagaattactgggagatgtactcaaagatcggccccaggaagcagatggaatcgattcggtgattgtagtggacaatgtccctcaggtgggacccgaccgacttgagaaactcaaaaatgtcatccacaagatcttttccaagtttgggaaaatcacaaatgatttttatcctgaagaggatgggaagacaaaagggtatattttcctggagtacgcgtcccctgcccacgctgtggatgctgtgaagaacgccgacggctacaagcttgacaagcagcacacattccgggtcaacctctttacggattttgacaagtatatgacgatcagtgacgagtgggatattccagagaaacagcctttcaaagacctggggaacttacgttactggcttgaagaggcagaatgcagagatcagtacagtgtgatttttgagagtggagaccgcacttccatattctggaatgacgtaaaagaccctgtctcaattgaagaaagagcgagatggacagagacgtatgtgcgttggtctcctaagggcacctacctggctacctttcatcaaagaggcattgctctatgggggggagagaaattcaagcaaattcagagattcagccaccaaggggttcagcttattgacttctcaccttgtgaaaggtacctggtgacctttagccccctgatggacacgcaggatgaccctcaggccataatcatctgggacatccttacggggcacaagaagaggggttttcactgtgagagctcagcccattggcctatttttaagtggagccatgatggcaaattctttgccagaatgaccctggatacgcttagcatctatgaaactccttctatgggtcttttggacaagaagagtttgaagatctctgggataaaagacttttcttggtctcctggtggtaacataatcgccttctgggtgcctgaagacaaagatattccagccagggtaaccctgatgcagctccctaccaggcaagagatccgagtgaggaacctgttcaatgtggtggactgcaagctccattggcagaagaacggagactacttgtgtgtgaaagtagataggactccgaaaggcacccagggtgttgtcacaaattttgaaattttccgaatgagggagaaacaggtacctgtggatgtggtcgagatgaaagaaaccatcatagcctttgcctgggaaccaaatggaagtaagtttgctgtgctgcacggagaggctccgcggatatctgtgtctttctaccacgtcaaaaacaacgggaagattgaactcatcaagatgttcgacaagcagcaggcgaacaccatcttctggagcccccaaggacagttcgtggtgttggcgggcctgaggagtatgaacggtgccttagcgtttgtggacacttcggactgcacggtcatgaacatcgcagagcactacatggcttccgacgtcgaatgggatcctactgggcgctacgtcgtcacctctgtgtcctggtggagccataaggtggacaacgcgtactggctgtggactttccagggacgcctcctgcagaagaacaacaaggaccgcttctgccagctgctgtggcggccccggcctcccacactcctgagccaggaacagatcaagcaaattaaaaaggatctgaagaaatactctaagatctttgaacagaaggatcgtttgagtcagtccaaagcctcaaaggaattggtggagagaaggcgcaccatgatggaagatttccggaagtaccggaaaatggcccaggagctctatatggagcagaaaaacgagcgcctggagttgcgaggaggggtggacactgacgagctggacagcaacgtggacgactgggaagaggagaccattgagttcttcgtcactgaagaaatcattcccctcggaatcaggagtgacctggagcactgtgcgcagccgtgtgtgctgtggagccgaggccgtcctgcaggaagccgcgtgactcccgcctcctccctgtgctctctggctctggactgtgactgcgcctggattctgccattgcgacacatttttgtgcctttcagcccctggtgtctgcagtgggggatttaaggcacccgcttccacttctttcttgtttggagttttctgttggaaccgccggcgttggctccgaagacttagcgacgcactggcggcaccttctcctgcgcccagtgatgtttccacggtgcctgtacacagccgagcagcatttccgttgaaggacttgcatccccattgcgggcagtgctggacgtgtcccggagacccaccggagggcgccgcatgccttgtacccccaccgtgcaggttgtggccggttttctccgcaggttgaacatggaaataaaagcaaacttgtatgaaaaaaaaaaaaaaaaaaactcgag

SEQ ID NO: 109 - DNA, 1599 bp, Homo sapiens
aattccggcggaagtggtggaggaacttccggcagcggcagctcaagtggccaaggcaagatgggtcaaagtcagagtggtggtcatggtcctggaggtggcaagaaggatgacgaggacaagaaaaagaaatatgaacctcctgtaccaactagagtggggaaaaagaagaagaaaacaaagggaccagatgctgccagcaaactgccactggtgacacctcacactcagtgccggttaaaattactgaagttagagagaattaaagactatcttctcatggaggaagaattcattagaaatcaggaacaaatgaaaccattagaagaaaagcaagaggaggaaagatcaaaagtggatgatctgagggggaccccgatgtcagtaggaaccttggaagagattattgatgacaatcatgccatcgtgtctacatctgtgggctcagaacactacgtcagcattctttcatttgtagacaaggatctgctggaacctggctgctcggtcctgctcaaccacaaggtgcatgccgtgataggggtgctgatggatgacacggatcccctggtcacagtgatgaaggtagaaaaggccccccaggagacctatgcagatattggggggttggacaaccaaattcaggaaattaaggaatctgtggagcttcctctcacccatcctgaatattatgaagagatgggtataaagcctcctaagggggtcattctctatggtccacctggcacaggtaaaaccttgttagccaaagcagtagcaaaccaaacctcagccactttcttgagagtggttggctctgaacttattcagaagtacctaggtgatgggcccaaactcgtacgggaattgttccgagttgctgaagaacatgcaccgtccatcgtgtttattgatgaaattgacgccattgggacaaaaagatatgactccaattctggtggtgagagagaaattcagcgaacaatgttggaactgctgaaccagttggatggatttgattctaggggagatgtgaaagttatcatggccacaaaccgaatagaaactttggatccagcacttatcagaccaggccgcattgacaggaagattgagttccccctgcctgatgaaaagacgaagaagcgcatctttcagattcacacaagcaggatgacgctggctgatgatgtaaccctggacgacctgatcatggctaaagatgacctctctggtgctgacatcaaggcaatctgtacagaagctggtctgatggccttaagagaacgtagaatgaaagtaacaaatgaagacttcaaaaaatctaaagaaaatgttctttataagaaacaggaaggcacccctgaggggctgtatctctaatgaaccatggctgtcatcaggaaaatggttgggagatttctcaatccctgaaagggatgaggttgggggagttgcccagaggaatccctgttcccactgatttttattagcaaaacatcctgtgtcttttggagtacgatgtgtaagtgcccattgggtggcctgttggtcactgtgcagcagtctgcttcccaataaagcgtgctctttcacaag

SEQ ID NO: 110 - DNA, 2146 bp, Homo sapiens
tactcccggagtcactcatcccttaagcaagcagggtggggttaggtgcgcgtgcgcggttttaatactcctccccgaactgccaactcttcacgcacgcgaagtaggccccaccctggctgggtttacgcgtgcgcactaacgggcctggtcccggaagaccacacgcgtgcgtggtggggactacggtgacagtaccccgggtggggcgagggccagtcatggcggagtcctggtctgggcaggccttgcaggctctgccggccacggtgctgggcgcgctgggcagcgagttcttgcgggagtgggaggcgcaggacatgcgcgtgaccctcttcaagctgctgctgctgtggttggtgttaagtctcctgggcatccagctggcgtgggggttctacgggaatacagtgaccgggttgtatcaccgtccaggtctgggtggtcagaatggatccacgcctgatggctccacgcatttcccttcgtgggaaatggcagcaaacgaacctctcaaaacccacagagaataagggaaggcagcagagggtctccaagggcatcactgggtctgctggcttctacactgggttctgctactccccagacctcagggacaactgccgggggttcagggttggtagcagggagtacccagtgcctacagggctgggcctcttctgcctcttaagcctgctccctcacccaggcactgggcaagtgaagagtttgcctgtactcttatctgggtgccttaaggagagagattgtgttcttcctctctcaggggtgataactcaggaagcctctgggttgggaagaccatcagttcttttgtcttaggtttcttttcctgtccctcttccatccccaagatgtgaccccataaaaatttttcctgagttggccaggcatggtggctcacgcctgtaatcccaacactttgggaggctgaggcaggcagatcacgaggtcaggagttcgagaccagcctgaccaacatggtgaaaaccccatctctactaaaaatacaaaaattagccgggtgtggtggcacacaccagtaatcccagctactcgggaggctgaagcaggagatttgcttgaacctgggaggcagaggttgcagtgagccaagattgcgccgttgtactccagcctgggcaacagagcaagacccatctcaaaaaaaaaatttttttcctgagaggaagcctgaggttgaccagctctggggtttgtaaggcaggtctgttttctcctaggccctgagttttctgaatctctggttttgctttgttggcaaggagccagggaatcctgacctgagccagaccttaagctctatggttatttagctggccattcaggtataaggcagggtggtgtacctgctggcactatccagatggaggcaccaaacacccacatacctggcccaaccagacttctcccgtgagccaggcaaaggaaattgtcatctgccaactgtcctactcatattcctctcagtccttcttgggggtaagctgattacctgaaggacagctgaacccctggggtagcctcctatccaccactgcttaagtgcctatgggaatgtgggtctgcaccttgtcccctcataggatggtaccaagcatttagtgcacagtggccccatcatagcctgcagcctcatcatttcccatctggacctggtacaaatgcacgtcacaggctcagctcctccccactagcatcttctctaccttcaagaaccaggcagccctgccatgtcacaataggccaggggagtttccaaagatgtgggtggcaaatgcccctatagaaacaccagtacctgaaagcactgtagccctggacctgcctccttccctcggggccatacttctgtttccatctgctgggccaccagccactttagtgacccctgcctacttccttcctgttggatatcatacttccatctggctgcctttgcttaagccatctttgtggtagaggggccctggaattgcagctgtactgaggatgatgttattcacagcccctggcccacccactaatactactgcacagagtcaggatctcacatttcaccccaggctcaactgaggatgtggcttattaaacacggaagtgc

SEQ ID NO: 111 - DNA, 894 bp, Homo sapiens
ggaagggacagtcggccgcagaccgcgctgggttgccgctgccgctgccgccatcgtgccagcccctcgggtctccgtgaggccgggtgacgctccagaatgggagacaagccaatttgggagcagattggatccagcttcattcaacattactaccagttatttgataatgatagaacccaactaggcgcaatttacattgacgcgtcatgccttacgtgggaaggacaacagttccaggggaaagctgccattgtggagaagttgtctagccttccgttccagaaaattcagcacagcatcaccgcgcaggaccatcagcccactccagatagctgcatcatcagcatggttgtgggccagcttaaggcggatgaagaccccatcatggggttccaccagatgttcctattaaagaacatcaacgatgcttgggtttgcaccaatgacatgttcaggctcgccctgcacaactttggctgacctcctctcagctaggcactcacgctgtttcctcctccctcctcttcccaatactattcccactcctccagatgctccaaatatcatgcacaaatgagcagggccgcggtgggagtgggcgcagtgcgctgctgccactgaggtgttgtgcatgatgtttggatgctagactagttgcatctgacgggagaagtttgtgttgtaccagcgcatgccttggaaagacttaagtaatgcaaaaggttgtccttttttttttttttttttttttaatctactgacaagttgctctagtaacccaaagaagtgaaggagaaagcagctgcctcaccgcccagacattgatttgttcagatgtttcaatgcctcatgatacaataaaaccacaaaaattttcttaacaaaaaaaaa

SEQ ID NO: 112 - DNA, 967 bp, Homo sapiens
aggaagtgtcggcgccgccactgtccggccacagcctaacgctcttcgctgtcgtttgtggtctcgcgcagggcggccccggttctggtgtttggcgtcggaattaaacaaccaccatgtcgagcaaaaaggcaaagaccaagaccaccaagaagcgccctcagcgtgcaacatccaatgtgtttgccatgtttgaccagtcacagattcaggagttcaaagaggccttcaacatgattgatcagaacagagatggcttcatcgacaaggaagatttgcatgatatgcttgcttctctagggaagaatcccactgatgcataccttgatgccatgatgaatgaggccccagggcccatcaatttcaccatgttcctcaccatgtttggtgagaagttaaatggcacagatcctgaagatgtcatcagaaatgcctttgcttgctttgatgaagaagcaactggcaccatacaggaagattacttgagagagctgctgacaaccatgggggatcggtttacagatgaggaagtggatgagctgtacagagaagcacctattgataaaaaggggaatttcaattacatcgagttcacacgcatcctgaaacatggagccaaagacaaagatgactgaaataacttcaaattccagccaaacgttccttgttgccactttgggtattctgagattttctcttgcatgcccttagctttacagcttttgcatttcctgttgtatttattctcagccattttgggcatatgtatctttataatcagactggaaacgggactttctattaatatcattttcagaataaaaaataggataatttaacctaccagcccttctcccccaataactgtggtctatacagagtcaatatattttttcagagaaagttattcgctcgattttttctgaatcataattaaactttatgataaaataaaaaaaaaaaaaaa

SEQ ID NO: 113 - DNA, 1667 bp, Homo sapiens
aagcacaggccaccactctgccctggtccacacaagctccggtagcccatggagccctggcctctcctcctgctctttagcctttgctcagctggcctcgtcctgggctccgaacatgagacccgtctggtggcaaagctatttaaagactacagcagcgtggtgcggccagtggaagaccaccgccaggtcgtggaggtcaccgtgggcctgcagctgatacagctcatcaatgtggatgaagtaaatcagatcgtgacaaccaatgtgcgtctgaaacagcaatgggtggattacaacctaaaatggaatccagatgactatggcggtgtgaaaaaaattcacattccttcagaaaagatctggcgcccagaccttgttctctataacaatgcagatggtgactttgctattgtcaagttcaccaaagtgctcctgcagtacactggccacatcacgtggacacctccagccatctttaaaagctactgtgagatcatcgtcacccactttccctttgatgaacagaactgcagcatgaagctgggcacctggacctacgacggctctgtcgtggccatcaacccggaaagcgaccagccagacctgagcaacttcatggagagcggggagtgggtgatcaaggagtcccggggctggaagcactccgtgacctattcctgctgccccgacaccccctacctggacatcacctaccacttcgtcatgcagcgcctgcccctctacttcatcgtcaacgtcatcatcccctgcctgctcttctccttcttaactggcctggtattctacctgcccacagactcaggggagaagatgactctgagcatctctgtcttactgtctttgactgtgttccttctggtcatcgtggagctgatcccctccacgtccagtgctgtgcccttgattggaaaatacatgctgttcaccatggtgttcgtcattgcctccatcatcatcactgtcatcgtcatcaacacacaccaccgctcacccagcacccatgtcatgcccaactgggtgcggaaggtttttatcgacactatcccaaatatcatgtttttctccacaatgaaaagaccatccagagaaaagcaagacaaaaagatttttacagaagacattgatatctctgacatttctggaaagccagggcctccacccatgggcttccactctcccctgatcaaacaccccgaggtgaaaagtgccatcgagggcatcaagtacatcgcagagaccatgaagtcagaccaggagtctaacaatgcggcggcagagtggaagtacgttgcaatggtgatggaccacatactcctcggagtcttcatgcttgtttgcatcatcggaaccctagccgtgtttgcaggtcgactcattgaattaaatcagcaaggatgagcagaaaatgagctgagcttagctctgccctggaacctaccagagcagagaagggcaggagaggaagatttgtctacttgctccactcgcacttatcaaacgtgttatattccatacttattattgatgataagatttacctttatgtaagtttatggccttgaagtgttttcatattgcttctccctttagttctgctgtctccctgaagagtgaaccctctttagtaaatgaaactaatcact

SEQ ID NO: 114 - DNA, 9416 bp, Homo sapiens
aagcgcgccgcctccccgccctctctcactccccgctcctctccgccgcgcactctcgcggcgctgggagagggcggagggggaggcggcgcgcggcgccagaggaggggggacgcagggggcggagcggagacagtaccttcggagataatcctttctcctgccgcagtggagaggagcggccggagcgagacacttcgccgaggcacagcagccggcaggatggcgaccgtggtggtggaagccaccgagccggagccgtccggcagcatcgccaacccggcggcgtccacctcgcctagcctgtcgcaccgcttccttgacagcaagttctacttgctggtggtcgtcggcgagatcgtgaccgaggagcacctgcggcgtgccatcggcaacatcgagctcggaatccgatcatgggacacaaacctgattgaatgcaacttggaccaagaactcaaactttttgtatctcgacactctgcaagattctctcctgaagtcccaggacaaaagatccttcatcaccgaagtgacgttttagaaacagtggtcctgatcaacccttctgatgaagcagtcagcaccgaggtgcgcttaatgatcactgatgctgcccgacacaagctgctcgtgctgaccgggcagtgctttgaaaataccggagagctcattctccagtccggctctttctccttccagaacttcatagagattttcaccgatcaagagatcggggagttactaagcaccacccatcctgccaacaaagccagcttaaccctgttctgtcctgaagaaggggactggaagaactccaatcttgacagacacaatctccaagacttcatcaatattaaactcaattcagcttctatcttgccagaaatggaaggactttctgagtttaccgagtatctctcagaatcagtggaagtcccatctccctttgacatcttggaacctcccacatcgggtggatttctgaagctctccaagccctgctgttatatttttccaggagggaggggcgattctgccttgtttgcagtgaatggtttcaatatgctcatcaatggcggatcagagagaaaatcctgcttctggaagctcatccgacacttagaccgagtggactccatcctgctcacccacattggggatgacaatttgcctggaataaacagcatgttacagcggaaaattgcagagctcgaggaagaacagtcccagggctccaccacaaatagtgactggatgaaaaacctcatctcccctgacttaggagttgtatttctcaatgtacctgaaaatctcaaaaatccagagccaaacatcaagatgaagagaagcatagaagaagcctgcttcactctccagtacctaaacaaattgtccatgaaaccagaacctctgtttagaagtgtaggcaatactattgatcctgtcattcttttccaaaaaatgggagtaggtaaacttgagatgtatgtgcttaatccagtcaagagcagcaaggaaatgcagtattttatgcagcagtggactggtaccaacaaagacaaggctgaattcattctgcctaatggtcaagaagtagatctcccgatttcctacttaacttcagtctcatctttgattgtgtggcatccagcaaaccctgcggagaaaatcatccgagtcctgtttcctgggaacagcacccagtacaacatcctggaagggttggaaaagctcaaacatctagactttctgaagcagccactggccacccaaaaggatctcactggccaggtgcccactcctgtggtgaaacaaacaaaactgaaacagagggctgatagccgagaaagtctgaagccagccgcaaaaccacttcctagcaaatccgtgcgcaaggagtcaaaagaagaaacccctgaggtcacaaaagtgaatcacgtggaaaagccacccaaagttgaaagcaaagaaaaggtaatggtgaaaaaagacaagccagtaaaaacagagaccaaaccttcagtgactgaaaaggaggttcccagcaaagaagagccatctccagtgaaagccgaggtggctgagaagcaagccacagatgtcaaacccaaagctgccaaggagaagacggtgaaaaaggaaacaaaggtaaagcctgaagacaagaaagaggagaaagaaaagccaaagaaagaagtggctaaaaaggaggacaaaacacctatcaagaaggaggaaaaaccaaaaaaggaagaggtgaaaaaagaagtcaaaaaagagatcaagaaagaagagaaaaaagaacccaagaaagaggttaagaaagaaacaccgccaaaggaagtcaagaaggaagttaagaaggaagagaagaaggaagtgaaaaaggaagaaaaggaacccaaaaaagaaattaagaagctccctaaagacgcaaagaaatcatctactcctctgtctgaagcaaaaaaaccagctgctttaaaaccaaaagtacccaagaaggaagagtctgtcaagaaagattctgttgctgccggaaagccaaaggagaaggggaaaataaaagtcattaagaaggaaggcaaggccgcagaggctgtcgctgcagctgtcggcactggagccaccacagcagctgtcatggcggcagctggaatagcagccattggccctgccaaagaactcgaagctgagaggtcccttatgtcatctcctgaggatctaaccaaggactttgaagagttaaaggctgaagaggtcgatgtaacaaaggacatcaagcctcagctggagctaatcgaagacgaagagaaactgaaggaaactgagccagtcgaagcctacgtcatccagaaggagagagaagtcaccaaaggtcctgccgagtcccctgatgagggaatcactaccactgaaggggagggcgaatgtgaacagacacctgaggagctggagcccgtcgagaagcagggagtagacgacattgaaaaatttgaagatgaaggagccggttttgaagaatcttcagagactggagactatgaagagaaggcagaaactgaggaggctgaggagccagaagaggatggggaggaacacgtatgtgtgagcgcctccaagcacagccccactgaggatgaggaaagtgccaaggcggaggctgatgcatacatcagggagaagagggagtctgtggccagtggggatgaccgagccgaagaagacatggatgaggccattgagaaaggagaggctgaacaatctgaagaggaggctgatgaggaggacaaagctgaagatgccagagaggaggaatatgagccggaaaaaatggaagctgaagactatgtgatggctgtggtcgacaaggctgcagaggctggtggtgccgaggagcagtatggattcctcaccacaccaaccaagcaactaggagcccagtctcctggccgagaacctgcatcttcaattcatgatgagactttacctggaggctcagagagcgaggccaccgcttctgatgaggagaatcgagaagaccagcctgaggaattcactgccacctctggctacactcagtctactattgagatatccagtgagcccacccccatggatgagatgtctacccctcgagacgtgatgagtgatgagaccaacaatgaagagacggagtccccttctcaggaattcgtaaatatcaccaaatatgaatcttcattgtattctcaggaatactctaaacctgctgatgttacaccgctcaacggattttctgaaggatcaaaaacagatgccactgatggcaaggattacaatgcttcagcctctaccatatcaccaccctcttccatggaggaagacaaattcagcagatctgctttacgtgatgcttactgctctgaagtgaaagccagcaccactttggacatcaaagatagcatctcagctgtttcaagtgaaaaggtcagcccatcgaagagcccgtccctgagtccatctccaccatcacccttagaaaagacccccctgggtgaacgtagtgtgaacttctctctgacgcccaatgagattaaagtctctgcagaggcagaagtagccccggtgtctcctgaggtgacccaagaagtagttgaagaacattgtgctagtcctgaggacaagactctggaagtggtgtcaccatctcagtccgtgactggcagtgctggtcacacaccttactatcaatctcctactgacgagaaatccagtcatctccctacagaagtcattgaaaaaccaccagcagttccagtgagttttgaattcagtgatgccaaagatgagaatgaaagggcttcagtaagccccatggatgagcccgtgcctgactcagagtctcctattgaaaaagttttgtctcctttacgcagcccgcccctcattggatccgagtctgcttatgaaagttttctaagtgctgatgacaaggcttctggcagaggtgccgaaagtccttttgaagaaaagagtggaaaacaaggctctccagaccaagtaagtccagtttctgaaatgacttctactagtctttaccaagacaaacaggaagggaaaagcacagactttgcaccaataaaagaagactttggccaagaaaagaaaactgatgatgttgaagccatgagttctcaaccagcactggctctggatgaaaggaaattaggagatgtttctcccacacaaatagatgtcagtcagtttggatcttttaaagaagacactaagatgtccatttctgaaggtactgtctcagacaagtcagctactcctgttgatgagggcgtagcagaagacacgtactctcatatggagggtgtggcctcagtgtccacagcctcagtggctacgagctcatttccagagccaacaacagatgatgtgtctccatctctgcatgctgaggttggctccccacattccacagaagtagatgactccctttcagtgtctgttgtgcaaacacctaccacattccaggaaacagaaatgtctccatctaaagaagaatgcccaagaccgatgtcaatttctccaccagatttctcccctaaaactgcaaagtccaggacacccgttcaagatcacagatctgaacagtcctcaatgtctattgaatttggccaagaatctcctgagcaatcccttgctatggacttcagtcgacagtctccagatcaccctacagtgggtgcaggcgtgcttcacatcactgaaaatgggccaactgaagtggactacagtccttctgacatgcaggactccagtttatcacataagataccacctatggaggagccgtcctacacccaagataatgatctttctgagctcatctcagtatctcaggtagaggcctccccgtccacctcttctgctcataccccttctcagatcgcttctcctctccaagaagatactctatccgatgttgctcctcccagagatatgtccttatatgcctcactcacctctgaaaaagtgcaaagtctggaaggagagaagctctctccaaaatctgatatctctccactcaccccacgagagtcctctcctttatattcacctactttttcagattctacctctgcagtcaaagagaaaacagcaacttgccacagttcctcttctccaccaatagatgcagcatccgcagagccctatggcttccgtgcctcagtgttattcgatacaatgcaacaccatctagccttgaatagagatttgtccacacctggcctggagaaggacagtggagggaagacacctggtgactttagctatgcctatcaaaagcctgaggaaacaaccaggtccccagatgaagaagattatgactatgagtcttatgagaagaccacccggacctcagatgtgggtggctattactatgagaagatagagagaaccacaaaatctccaagtgacagtggctactcctatgagaccattgggaaaactaccaagacccctgaagatggtgactattcctatgaaattattgagaagaccacacggacccctgaagagggtgggtactcatatgacataagtgaaaagaccaccagcccccccgaagtgagtggttacagctatgaaaagactgagaggtctagaaggcttctggatgacatcagcaatggctatgatgactctgaggatggtggccacacacttggggaccccagctactcttatgaaaccactgagaaaattaccagtttccctgagtctgaaggttattcctatgagacatctacaaagacaacacgaacccctgatacttccacatactgttacgagactgcagagaaaatcactagaacccctcaggcatccacatattcctacgagacttcagacctatgctacactgcagaaaagaagtccccctcagaagcccgtcaggatgtcgatttatgcctcgtgtcctcttgtgaatacaagcaccccaagacagagctttcaccctctttcattaatcccaatcctcttgagtggtttgccagtgaagaacccactgaagaatctgaaaagcccctcactcaatcagggggagccccaccgcctccaggaggaaagcaacagggccgacagtgtgatgaaacccctcccacctcagtcagcgagtcagccccatcccagaccgactctgatgttcccccggagactgaagagtgcccctccatcacggccgatgccaatatcgactctgaagacgagtcggaaaccatccccacagacaaaactgtcacgtacaaacacatggacccacctccagctcccgtgcaagaccgcagcccttcgccacgccaccctgatgtgtccatggtggacccagaggccttggccattgagcagaacctgggcaaagctctaaagaaagatctgaaagagaagaccaaaaccaaaaagccaggtacaaagaccaagtcatcttcacctgtcaaaaagagtgatgggaagtctaagcccttggcagcttcaccaaaaccagcgggcttgaaagaatcctcggataaagtgtccagggtggcttctcctaagaagaaagaatctgtggaaaaggcagcaaaacccaccaccactcctgaggtcaaagctgcacgtggggaagagaaagacaaggagaccaagaatgctgccaatgcctctgcatccaagtcggccaagaccgccactgcaggaccaggaactaccaagacgaccaagtcatctgctgtgcccccaggcctccctgtgtatttggacctgtgctacattcctaaccacagcaatagtaagaatgttgatgtggaatttttcaagagagtgcggtcttcctactacgtggtgagtgggaatgaccctgctgctgaggagcccagccgggctgtcctggacgctttgttggaaggaaaggctcagtggggcagcaacatgcaggtgacactgatcccaactcatgactcagaagtgatgagggaatggtaccaggagacccatgagaaacagcaagatctcaacatcatggttttagcaagcagcagcacagtggttatgcaagatgaatccttccctgcatgcaagattgaactgtaaaaaccaaggccagccacaccacaggatctgaactttgtttccagaaattcttcaatttgaaatcaccttttctaaaaagtcaattcatctagttaagtcgctgaacaattacctgccaaatgctatactgtgtcatggtgatgcaagtcactaaatttctcagtttttgctgattgctaagggaaataacagtatttccacaatagggttcaaattcctgcaaaattacctaccccagttcatctctgctgaacatttggaaaccatgcactagccaacccaactgacttctgctaggtagaggcatttgtcttagagagagagagagcgcgggagagagtgagagagagtgagagcacaaagataacgcaggagagagagagagaaagaatgagaaagaaaaggaatgcaagagaaggagatgtaatgacagagagttctggtgagatacccagagagaaaaagagagagcagggtggggtaaggaggagaaaataaaccaacaattaggtctgcattttctcaggcagtaggcattctttagtctacataggcaaagttttccatttttgtcagtctgagtcatcaaaaagagtcttaattttctaaaacaagttggctagaagaaagtaaaaagaacaacacttgttatgagggcatgtgatattttcacatcttaattaagctccttcagtttgaaggctgcacactgacataatgtagtgagtgtagactggccatgcaagtggtttgggccccattcagaactctcagactctaaacacacaagtagattgatctaaggcatgctcccagcatttgtccacccacttagtccactctgagtcgattaacctgcatgcagcaacacccaagtccaccccaattaactgaagcaaataccaaagcagttgggagtacatatggtagacaatttgccttaggaagtgacttgaatgtacaaagatacttgatgcacttattttttaatgtgagacagcaagtttataaaacatccatataggattatagatacttaaaggaacacgtgggtgagcgtgtgtgggggtactagaagctgatctgattggtccaacagtttgatgctgagtcatgcgtgttgaatcccacttcagtgcacctgtggcctctcagtcaaacaagttgtgcctttcacagcttctttactactgcaagttcaagactgaaatggcttctatgatcagaactgggaaaacagtgaatcttatggtggaagaggttctcagcaagtgtacagtatttaccttcctttgtcttacattggctttttaaattttccattaatttcaacataattatgggaacaagtgtacagaagaattttttttttaagatatgtgagaacttttcatagatgaactttttaacaaatgttttcatttacaggaaattgcaaagaaaattctcaagtgatagtctttttttttaagtgtttcgtaagacaaaaattgaataatgttttttgaagttctggcaagattgaagtctgatattgcagtaatgatatttattaaaaacccataactaccaggaataatgatacctcccaccccttgattcccataacataaaagtgctacttgagagtgggggagaatggcatggtaggctacttttcagggccttgacaagtacatcacccagtggtatcctacatacttctttcaagatcttcaaccatgaggtaaaagagccaagttcaaagaaccctagcacaaatttgctttgggattttcttttctgga

SEQ ID NO: 115 - protein, 655 aa, Homo sapiens
MPEDRNSGGCPAGALASTPFIPKTTYRRIKRCFSFRKGIFGQKLEDTVRYEKRYGNRLAPMLVEQCVDFIRQRGLKEEGLFRLPGQANLVKELQDAFDCGEKPSFDSNTDVHTVASLLKLYLRELPEPVIPYAKYEDFLSCAKLLSKEEEAGVKELAKQVKSLPVVNYNLLKYICRFLDEVQSYSGVNKMSVQNLATVFGPNILRPKVEDPLTIMEGTVVVQQLMSVMISKHDCLFPKDAELQSKPQDGVSNNNEIQKKATMGLLQNKENNNTKDSPSRQCSWDKSESPQRSSMNNGSPTALSGSKTNSPKNSVHKLDVSRSPPLMVKKNPAFNKGSGIVTNGSFSSSNAEGLEKTQTTPNGSLQARRSSSLKVSGTKMGTHSVQNGTVRMGILNSDTLGNPTNVRNMSWLPNGYVTLRDNKQKEQAGELGQHNRLSTYDNVHQQFSMMNLDDKQSIDSATWSTSSCEISLPENSNSCRSSTTTCPEQDFFGGNFEDPVLDGPPQDDLSHPRDYESKSDHRSVGGRSSRATSSSDNSETFVGNSSSNHSALHSLVSSLKQEMTKQKIEYESRIKSLEQRNLTLETEMMSLHDELDQERKKFTMIEIKMRNAERAKEDAEKRNDMLQKEMEQFFSTFGELTVEPRRTERGNTIWIQ

SEQ ID NO: 116 - protein, 1053 aa, Homo sapiens
MAEFTSYKETASSRHLRFKLQSLSRRLDELEEATKNLQKAEDELLDLQDKVIQAEGSNSSMLAEIEVLRQRVLRIEGKDEEIKRAEDLCRLMKEKLEEEENLTRELKSEIERLQKRMAELEKLEEAFSRSKNDCTQLCLSLNEERNLTKKISSELEMLRVKVKELESSEDRLDKTEQSLASELEKLKSLTLSFVSERKYLNEKEKENEKLIKELTQKLEQNKKMNRDYTRNASNLERNDLRIEDGISSTLPSKESRRKGGLDYLKQVENETRNKSENEKNRNQEDNKVKDLNQEIEKLKTQIKHFESLEEELKKMKSKNNDLQDNYLSEQNKNKLLASQLEEIKLQIKKQKELENGEVEGEDAFLSSKGRHERTKFRGHGSEASVSKHTARELSPQHKRERLRNREFALNNENYSLSNRQVSSPSFTNRRAAKASHMGVSTDSGTQETKKTEDRFVPSSSKSEGKKSREQPSVLSRYPPAAQEHSKAWKGTSKPGTESGLKGKVEKTTRTFSDTTHGSVPSDPLGRADKASDTSSETVFGKRGHVLGNGSQVTQAANSGCSKAIGALASSRRSSSEGLSKGKKAANGLEADNSCPNSKAPVLSKYPYSCRSQENILQGFSTSHKEGVNQPAAVVMEDSSPHEALRCRVIKSSGREKPDSDDDLDIASLVTAKLVNTTITPEPEPKPQPNSREKAKTRGAPRTSLFENDKDAGMENESVKSVRASTNTMELPDTNGAGVKSQRPFSPREALRSRAIIKPVIVDKDVKKIMGGSGTETTLEKQKPVSKPGPNKVTSSITIYPSDSSSPRAAPGEALRERHTSTSNIQVGLAELTSVSNHVSSPFELSIHKHDITLQLAEAERMADGPLKNRPETVVSRSSIIIKPSDPVERNSHAPPAETIRWKSHSAPSEVGFSDARHVTVRNAWKSRRDLKSLEDPPTRIGKNVESTNSNAYTQRSSTDFSELEQPRSCLFEQGTRRVGPSSGDAPEPSSRRTQSSLTVSEVLTRRNRVGDTITVAAWNHSASMVSSSLSPLSLFSLPFPSLPFPFSPLLWPV

SEQ ID NO: 117 - protein, 179 aa, Homo sapiens
MKGGSRVSNPAVMAQEEEDVRDYNLTEEQKAIKAKYPPVNRKYEYLDHTADVQLHAWGDTLEEAFEQCAMAMFGYMTDTGTVEPLQTVEVETQGDDLQSLLFHFLDEWLYKFSADEFFIPREVKVLSIDQRNFKLRSIGWGEEFSLSKHPQGTEVKAITYSAMQVYNEENPEVFVIIDI

SEQ ID NO: 118 - protein, 420 aa, Homo sapiens
MAPWPPKGLVPAVLWGLSLFLNLPGPIWLQPSPPPQSSPPPQPHPCHTCRGLVDSFNKGLERTIRDNFGGGNTAWEEENLSKYKDSETRLVEVLEGVCSKSDFECHRLLELSEELVESWWFHKQQEAPDLFQWLCSDSLKLCCPAGTFGPSCLPCPGGTERPCGGYGQCEGEGTRGGSGHCDCQAGYGGEACGQCGLGYFEAERNASHLVCSACFGPCARCSGPEESNCLQCKKGWALHHLKCVDIDECGTEGANCGADQFCVNTEGSYECRDCAKACLGCMGAGPGRCKKCSPGYQQVGSKCLDVDECETEVCPGENKQCENTEGGYRCICAEGYKQMEGICVKEQIPESAGFFSEMTEDELVVLQQMFFGIIICALATLAAKGDLVFTAIFIGAVAAMTGYWLSERSDRVLEGFIKGR

SEQ ID NO: 119 - protein, 1346 aa, Homo sapiens
MQEDESYLLQVLRYLIEFELKESDNPRRLLRRGTCAFSILFKLFSEGLFSAKLFLTATLHEPIMQLLVEDEDHLETDPNKLIERFSPSQQEKLFGEKGSDRFRQKVQEMVESNEAKLVALVNKFIGYLKQNTYCFPHSLRWIVSQMYKTLSCVDRLEVGEVRAMCTDLLLACFICPAVVNPEQYGIISDAPINEVARFNLMQVGRLLQQLTMTGSEEGDPRTKSSLGKFDKSCVAAFLDVVIGGRAVETPPLSSVNLLEGLSRTVVYITYSQLITLVDFMKSVMSGDQLREDRMALDNLLANLPPAKPGKSSSLEMTPYNTPQLSPATTPANKKNRLPIATRSRSRTNMLMDLHMDHEGSSQETIQEVQPEEVLVISLGTGPQLTPGMMSGNEVLNMQLSDGGQGDVPVDENKLHGKPDKTLRFSLCSDNLEGISEGPSNRSNSVSSLDLEGESVSELGAGPSGSNGVEALQLLEHEQATTQDNLDDKLRKFEIRDMMGLTDDRDISETVSETWSTDVLGSDFDPNIDEDRLQEIAGAAAENMLGSLLCLPGSGSVLLDPCTGSTISETTSEAWSVEVLPSDSEAPDLKQEERLQELESCSGLGSTSDDTDVREVSSRPSTPGLSVVSGISATSEDIPNKIEDLRSECSSDFGGKDSVTSPDMDEITHDFLYILQPKQHFQHIEAEADMRIQLSSSAHQLTSPPSQSESLLAMFDPLSSHEGASAVVRPKVHYARPSHPPPDPPILEGAVGGNEARLPNFGSHVLTPAEMEAFKQRHSYPERLVRSRSSDIVSSVRRPMSDPSWNRRPGNEERELPPAAAIGATSLVAAPHSSSSSPSKDSSRGETEERKDSDDEKSDRNRPWWRKRFVSAMPKAPIPFRKKEKQEKDKDDLGPDRFSTLTDDPSPRLSAQAQVAEDILDKYRNAIKRTSPSDGAMANYESTEVMGDGESAHDSPRDEALQNISADDLPDSASQAAHPQDSAFSYRDAKKKLRLALCSADSVAFPVLTHSTRNGLPDHTDPEDNEIVCFLKVQIAEAINLQDKNLMAQLQETMRCVCRFDNRTCRKLLASIAEDYRKRAPYIAYLTRCRQGLQTTQAHLERLLQRVLRDKEVANRYFTTVCVRLLLESKEKKIREFIQDFQKLTAADDKTAQVEDFLQFLYGAMAQDVIWQNASEEQLQDAQLAIERSVMNRIFKLAFYPNQDGDILRDQVLHEHIQRLSKVVTANHRALQIPEVYLREAPWPSAQSEIRTISAYKTPRDKVQCILRMCSTIMNLLSLANEDSVPGADDFVPVLVFVLIKANPPCLLSTVQYISSFYASCLSGEESYWWMQFTAAVEFIKTIDDRK

SEQ ID NO: 120 - protein, 323 aa, Homo sapiens [sequence omitted]

SEQ ID NO: 121 - protein, 111 aa, Homo sapiens
MTWPSDASYSGLLLFSPRNCFQVTYHVHFSAALLTFAHLPVTLRVQIRIMWPVQSSENCEDYPCLSDSAQGQRWMGKWCCWRHFYLHTRLCFIPAPRTPTHSPEGVKCRGG

SEQ ID NO: 122 - protein, 217 aa, Homo sapiens
MAAQCVRLARRSLPALALSLRPSPRLLCTATKQKNSGQNLEEDMGQSEQKADPPATEKTLLEEKVKLEEQLKETVEKYKRALADTENLRQRSQKLVEEAKLYGIQAFCKDLLEVADVLEKATQCVPKEEIKDDNPHLKNLYEGLVMTEVQIQKVFTKHGLLKLNPVGAKFDPYEHEALFHTPVEGKEPGTVALVSKVGYKLHGRTLRPALVGVVKEA

SEQ ID NO: 123 - protein, 395 aa, Homo sapiens
MLPAVGSADEEEDPAEEDCPELVPMETTQSEEEEKSGLGAKIPVTIITGYLGAGKTTLLNYILTEQHSKRVAVILNEFGEGSALEKSLAVSQGGELYEEWLELRNGCLCCSVKDNGLRAIENLMQKKGKFDYILLETTGLADPGAVASMFWVDAELGSDIYLDGIITIVDSKYGLKHLTEEKPDGLINEATRQVALADAILINKTDLVPEEDVKKLRTTIRSINGLGQILETQRSRVDLSNVLDLHAFDSLSGISLQKKLQHVPGTQPHLDQSIVTITFEVPGNAKEEHLNMFIQNLLWEKNVRNKDNHCMEVIRLKGLVSIKDKSQQVIVQGVHELYDLEETPVSWKDDTERTNRLVLLGRNLDKDILKQLFIATVTETEKQWTTRFQEDQVCT

SEQ ID NO: 124 - protein, 1141 aa, Homo sapiens
MAAAVGVRGRYELPPCSGPGWLLSLSALLSVAARGAFATTHWVVTEDGKIQQQVDSPMNLKHPHDLVILMRQEATVNYLKELEKQLVAQKIHIEENEDRDTGLEQRHNKEDPDCIKAKVPLGDLDLYDGTYITLESKDISPEDYIDTESPVPPDPEQPDCTKILELPYSIHAFQHLRGVQERVNLSAPLLPKEDPIFTYLSKRLGRSIDDIGHLIHEGLQKNTSSWVLYNMASFYWRIKNEPYQVVECAMRALHFSSRHNKDIALVNLANVLHRAHFSADAAVVVHAALDDSDFFTSYYTLGNIYAMLGEYNHSVLCYDHALQARPGFEQAIKRKHAVLCQQKLEQKLEAQHRSLQRTLNELKEYQKQHDHYLRQQEILEKHKLIQEEQILRNIIHETQMAKEAQLGNHQICRLVNQQHSLHCQWDQPVRYHRGDIFENVDYVQFGEDSSTSSMMSVNFDVQSNQSDINDSVKSSPVAHSILWIWGRDSDAYRDKQHILWPKRADCTESYPRVPVGGELPTYFLPPENKGLRIHELSSDDYSTEEEAQTPDCSITDFRKSHTLSYLVKELEVRMDLKAKMPDDHARKILLSRINNYTIPEEEIGSFLFHAINKPNAPIWLILNEAGLYWRAVGNSTFAIACLQRALNLAPLQYQDVPLVNLANLLIHYGLHLDATKLLLQALAINSSEPLTFLSLGNAYLALKNISGALEAFRQALKLTTKCPECENSLKLIRCMQFYPFLYNITSSVCSGTVVEESNGSDEMENSDETKMSEEILALVDEFQQAWPLEGFGGALEMKGRRLDLQGIRVLKKGPQDGVARSSCYGDCRSEDDEATEWITFQVKRVKKPKGDHKKTPGKKVETGQIENGHRYQANLEITGPKVASPGPQGKKRDYQRLGWPSPDECLKLRWVELTAIVSTWLAVSSKNIDITEHIDFATPIQQPAMEPLCNGNLPTSMHTLDHLHGVSNRASLHYTGESQLTEVLQNLGKDQYPQQSLEQIGTRIAKVLEKNQTSWVLSSMAALYWRVKGQGKKAIDCLRQALHYAPHQMKDVPLISLANILHNAKLWNDAVIVATMAVEIAPHFAVNHFTLGNVYVAMEEFEKALVWYESTLKLQPEFVPAKNRIQTIQCHLMLKKGRRSP

SEQ ID NO: 125 - protein, 820 aa, Homo sapiens
GGRQRCQRGRSCGAREEEVEPGTARPPPAASAMDASLEKIADPTLAEMGKNLKEAVKMLEDSQRRTEEENGKKLISGDIPGPLQGSGQDMVSILQLVQNLMHGDEDEEPQSPRIQNIGEQGHMALLGHSLGAYISTLDKEKLRKLTTRILSDTTLWLCRIFRYENGCAYFHEEEREGLAKICRLAIHSRYEDFVVDGFNVLYNKKPVIYLSAAARPGLGQYLCNQLGLPFPCLCRVPCNTVFGSQHQMDVAFLEKLIKDDIERGRLPLLLVANAGTAAVGHTDKIGRLKELCEQYGIWLHVEGVNLATLALGYVSSSVLAAAKCDSMTMTPGPWLGLPAVPAVTLYKHDDPALTLVAGLTSNKPTDKLRALPLWLSLQYLGLDGFVERIKHACQLSQRLQESLKKVNYIKILVEDELSSPVVVFRFFQELPGSDPVFKAVPVPNMTPSGVGRERHSCDALNRWLGEQLKQLVPASGLTVMDLEAEGTCLRFSPLMTAAVLGTRGEDVDQLVACIESKLPVLCCTLQLREEFKQEVEATAGLLYVDDPNWSGIGVVRYEHANDDKSSLKSDPEGENIHAGLLKKLNELESDLTFKIGPEYKSMKSCLYVGMASDNVDAAELVETIAATAREIEENSRLLENMTEVVRKGIQEAQVELQKASEERLLEEGVLRQIPVVGSVLNWFSPVQALQKGRTFNLTAGSLESTEPIYVYKAQGAGVTLPPTPSGSRTKQRLPGQKPFKRSLRGSDALSETSSVSHIEDLEKVERLSSGPEQITLEASSTEGHPGAPSPQHTDQTEAFQKGVPHPEDDHSQVEGPESLR

SEQ ID NO: 126 - protein, 211 aa, Homo sapiens
MAVVPLLLLGGLWSAVGASSLGVVTCGSVVKLLNTRHNVRLHSHDVRYGSGSGQQSVTGVTSVDDSNSYWRIRGKSATVCERGTPIKCGQPIRLTHVNTGRNLHSHHFTSPLSGNQEVSAFGEEGEGDYLDDWTVLCNGPYWVRDGEVRFKHSSTEVLLSVTGEQYGRPISGQKEVHGMAQPSQNNYWKAMEGIFMKPSELLKAEAHHAEL

SEQ ID NO: 127 - protein, 578 aa, Homo sapiens
MACGFRRAIACQLSRVLNLPPENLITSISAVPISQKEEVADFQLSVDSLLEKDNDHSRPDIQVQAKRLAEKLRCDTVVSEISTGQRTVNFKINRELLTKTVLQQVIEDGSKYGLKSELFSGLPQKKIVVEFSSPNVAKKFHVGHLRSTIIGNFIANLKEALGHQVIRINYLGDWGMQFGLLGTGFQLFGYEEKLQSNPLQHLFEVYVQVNKEAADDKSVAKAAQEFFQRLELGDVQALSLWQKFRDLSIEEYIRVYKRLGVYFDEYSGESFYREKSQEVLKLLESKGLLLRTIKGTAVVDLSGNGDPSSICTVMRSDGTSLYATRDLAAAIDRMDKYNFDTMIYVTDKGQKKHFQQVFQMLKIMGYDWAERCQHVPFGVVQGMKTRRGDVTFLEDVLNEIQLRMLQNMASIKTTKELKNPQETAERVGLAALIIQDFKGLLLSDYKFSWDRVFQSRGDTGVFLQYTHARLHSLEETFGCGYLNDFNTACLQEPQSVSILQHLLRFDEVLYKSSQDFQPRHIVSYLLTLSHLAAVAHKTLQIKDSPPEVAGARLHLFKAVRSVLANGMKLLGITPVCRM

SEQ ID NO: 128 - protein, 324 aa, Homo sapiens
MEDAKVYVAKVDCTAHSDVCSAQGVRGYPTLKLFKPGQEAVKYQGPRDFQTLENWMLQTLNEEPVTPEPEVEPPSAPELKQGLYELSASNFELHVAQGDHFIKFFAPWCGHCKALAPTWEQLALGLEHSETVKIGKVDCTQHYELCSGNQVRGYPTLLWFRDGKKVDQYKGKRDLESLREYVESQLQRTETGATETVTPSEAPVLAAEPEADKGTVLALTENNFDDTIAEGITFIKFYAPWCGHCKTLAPTWEELSKKEFPGLAGVKIAEVDCTAERNICSKYSVRGYPTLLLFRGGKKVSEHSGGRDLDSLHRFVLSQAKDEL

SEQ ID NO: 129 - protein, 1485 aa, Homo sapiens
PSPGGQMHAGISSFQQSNSSGTYGPQMSQYGPQGNYSRPPAYSGVPSASYSGPGPGMGISANNQMHGQGPSQPCGAVPLGRMPSAGMQNRPFPGNMSSMTPSSPGMSQQGGPGMGPPMPTVNRKAQEAAAAVMQAAANSAQSRQGSFPGMNQSGLMASSSPYSQPMNNSSSLMNTQAPPYSMAPAMVNSSAASVGLADMMSPGESKLPLPLKADGKEEGTPQPESKSKDSYSSQGISQPPTPGNLPVPSPMSPSSASISSFHGDESDSISSPGWPKTPSSPKSSSSTTTGEKITKVYELGNEPERKLWVDRYLTFMEERGSPVSSLPAVGKKPLDLFRLYVCVKEIGGLAQVNKNKKWRELATNLNVGTSSSAASSLKKQYIQYLFAFECKIERGEEPPPEVFSTGDTKKQPKLQPPSPANSGSLQGPQTPQSTGSNSMAEVPGDLKPPTPASTPHGQMTPMQGGRSSTISVHDPFSDVSDSSFPKRNSMTPNAPYQQGMSMPDVMGRMPYEPNKDPFGGMRKVPGSSEPFMTQGQMPNSSMQDMYNQSPSGAMSNLGMGQRQQFPYGASYDRRHEPYGQQYPGQGPPSGQPPYGGHQPGLYPQQPNYKRHMDGMYGPPAKRHEGDMYNMQYSSQQQEMYNQYGGSYSGPDRRPIQGQYPYPYSRERMQGPGQIQTHGIPLQMMGGPLQSSSSEGPQQNMWAARNDMPYPYQNRQGPGGPTQAPPYPGMNRTDDMMVPDQRINHESQWPSHVSQRQPYMSSSASMQPITRPPQPSYQTPPSLPNHISRAPSPASFQRSLENRMSPSKSPFLPSMKMQKVMPTVPTSQVTGPPPQPPPIRREITFPPGSVEASQPVLKQRRKITSKDIVTPEAWRVMMSLKSGLLAESTWALDTINILLYDDSTVATFNLSQLSGFLELLVEYFRKCLIDIFGILMEYEVGDPSQKALDHNAARKDDSQSLADDSGKEEEDAECIDDDEEDEEDEEEDSEKTESDEKSSIALTAPDAAADPKEKPKQASKFDKLPIKIVKKNNLFVVDRSDKLGRVQEFNSGLLHWQLGGGDTTEHIQTHFESKMEIPPRRRPPPPLSSAGRKKEQEGKGDSEEQQEKSIIATIDDVLSARPGALPEDANPGPQTESSKFPFGIQQAKSHRNIKLLEDEPRSRDETPLCTIAHWQDSLAKRCICVSNIVRSLSFVPGNDAEMSKHPGLVLILGKLILLHHEHPERKRAPQTYEKEEDEDKGVACSKDEWWWDCLEVLRDNTLVTLANISGQLDLSAYTESICLPILDGLLHWMVCPSAEAQDPFPTVGPNSVLSPQRLVLETLCKLSIQDNNVDLILATPPFSRQEKFYATLVRYVGDRKNPVCREMSMALLSNLAQGDALAARAIAVQKGSIGNLISFLEDGVTMAQYQQSQHNLMHMQPPPLEPPSVDMMCRAAKALLAMARVDENRSEFLLHEGRLLDISISAVLNSLVASVICDVLFQIGQL

SEQ ID NO: 130 - protein, 366 aa, Homo sapiens
MDSDDEMVEEAVEGHLDDDGLPHGFCTVTYSSTDRFEGNFVHGEKNGRGKFFFFDGSTLEGYYVDDALQGQGVYTYEDGGVLQGTYVDGELNGPAQEYDTDGRLIFKGQYKDNIRHGVCWIYYPDGGSLVGEVNEDGEMTGEKIAYVYPDERTALYGKFIDGEMIEGKLATLMSTEEGRPHFELMPGNSVYHFDKSTSSCISTNALLPDPYESERVYVAESLISSAGEGLFSKVAVGPNTVMSFYNGVRITHQEVDSRDWALNGNTLSLDEETVIDVPEPYNHVSKYCASLGHKANHSFTPNCIYDMFVHPRFGPIKCIRTLRAVEADEELTVAYGYDHSPPGKSGPEAPEWYQVELKAFQATQQK

SEQ ID NO: 131 - protein, 796 aa, Homo sapiens
MPTTQQSPQDEQEKLLDEAIQAVKVQSFQMKRCLDKNKLMDALKHASNMLGELRTSMLSPKSYYELYMAISDELHYLEVYLTDEFAKGRKVADLYELVQYAGNIIPRLYLLITVGVVYVKSFPQSRKDILKDLVEMCRGVQHPLRGLFLRNYLLQCTRNILPDEGEPTDEETTGDISDSMDFVLLNFAEMNKLWVRMQHQGHSRDREKRERERQELRILVGTNLVRLSQLEGVNVERYKQIVLTGILEQVVNCRDALAQEYLMECIIQVFPDEFHLQTLNPFLRACAELHQNVNVKNIIIALIDRLALFAHREDGPGIPADIKLFDIFSQQVATVIQSRQDMPSEDVVSLQVSLINLAMKCYPDRVDYVDKVLETTVEIFNKLNLEHIATSSAVSKELTRLLKIPVDTYNNILTVLKLKHFHPLFEYFDYESRKSMSCYVLSNVLDYNTEIVSQDQVDSIMNLVSTLIQDQPDQPVEDPDPEDFADEQSLVGRFIHLLRSEDPDQQYLILNTARKHFGAGGNQRIRFTLPPLVFAAYQLAFRYKENSKVDDKWEKKCQKIFSFAHQTISALIKAELAELPLRLFLQGALAAGEIGFENHETVAYEFMSQAFSLYEDEISDSKAQLAAITLIIGTFERMKCFSEENHEPLRTQCALAASKLLKKPDQGRAVSTCAHLFWSGRNTDKNGEELHGGKRVMECLKKALKIANQCMDPSLQVQLFIEILNRYIYFYEKENDAVTIQVLNQLIQKIREDLPNLESSEETEQINKHFHNTLEHLRLRRESPESEGPIYEGLIL

SEQ ID NO: 132 - protein, 206 aa, Homo sapiens
MGAEWELGAEAGGSLLLCAALLAAGCALGLRLGRGQGAADRGALIWLCYDALVHFALEGPFVYLSLVGNVANSDGLIASLWKEYGKADARWVYFDPTIVSVEILTVALDGSLALFLIYAIVKEKYYRHFLQITLCVCELYGCWMTFLPEWLTRSPNLNTSNWLYCWLYLFFFNGVWVLIPGLLLWQSWLELKKMHQKETSSVKKFQ

SEQ ID NO: 133 - protein, 579 aa, Homo sapiens
NATYVQPRRKQRDEQLLTNVLETLRGDGNVLIAVDTAGRVLELAQLLDQIWRTKDAGLGVYSLALLNNVSYNVVEFSKSQVEWMSDKLMRCFEDKRNNPFQFRHLSLCHGLSDLARVPSPKVVLASQPDLECGFSRDLFIQWCQDPKNSIILTYRTTPGTLARFLIDNPSEKITEIELRKRVKLEGKELEEYLEKEKLKKEAAKKLEQSKEADIDSSDESDIEEDIDQPSAHKTKHDLMMKGEGSRKGSFFKQAKKSYPMFPAPEERIKWDEYGEIIKPEDFLVPELQATEEEKSKLESGLTNGDEPMDQDLSDVPTKCISTTESIEIKARVTYIDYEGRSDGDSIKKIINQMKPRQLIIVHGPPEASQDLAECCRAFGGKDIKVYMPKLHETVDATSETHIYQVRLKDSLVSSLQFCKAKDAELAWIDGVLDMRVSKVDTGVILEEGELKDDGEDSEMQVEAPSDSSVIAQQKAMKSLFGDDEKETGEESEIIPTLEPLPPHEVPGHQSVFMNEPRLSDFKQVLLREGIQAEFVGGVLVCNNQVAVRRTETGRIGLEGCLCQDFYRIRDLLYEQYAIV

SEQ ID NO: 134 - protein, 400 aa, Homo sapiens
MAANYSSTSTRREHVKVKTSSQPGFLERLSETSGGMFVGLMAFLLSFYLIFTNEGRALKTATSLAEGLSLVVSPDSIHSVAPENEGRLVHIIGALRTSKLLSDPNYGVHLPAVKLRRHVEMYQWVETEESREYTEDGQVKKETRYSYNTEWRSEIINSKNFDREIGHKNPSAMAVESFMATAPFVQIGRFFLSSGLIDKVDNFKSLSLSKLEDPHVDIIRRGDFFYHSENPKYPEVGDLRVSFSYAGLSGDDPDLGPAHVVTVIARQRGDQLVPFSTKSGDTLLLLHHGDFSAEEVFHRELRSNSMKTWGLRAAGWMAMFMGLNLMTRILYTLVDWFPVFRDLVNIGLKAFAFCVATSLTLLTVAAGWLFYRPLWALLIAGLALVPILVARTRVPAKKLE

SEQ ID NO: 135 - protein, 459 aa, Homo sapiens
MLKLIVPTIMLLPLTWLSKKHMIWINTTTHSLIISIIPLLFFNQINNNLFSCSPTFSSDPLTTPLLMLTTWLLPLTIMASQRHLSSEPLSRKKLYLSMLISLQISLIMTFTATELIMFYIFFETTLIPTLAIITRWGNQPERLNAGTYFLFYTLVGSLPLLIALIYTHNTLGSLNILLLTLTAQELSNSWANNLMWLAYTMAFMVKMPLYGLHLWLPKAHVEAPIAGSMVLAAVLLKLGGYGMMRLTLILNPLTKHMAYPFLVLSLWGMIMTSSICLRQTDLKSLIAYSSISHMALVVTAILIQTPWSFTGAVILMIAHGLTSSLLFCLANSNYERTHSRIMILSQGLQTLLPLMAFWWLLASLANLALPPTINLLGELSVLVTTFSWSNITLLLTGLNMLVTALYSLYMFTTTQWGSLTHHINNMKPSFTRENTLMFMHLSPILLLSLNPDIITGFSS

SEQ ID NO: 136 - protein, 568 aa, Homo sapiens
MPSTDLLMLKAFEPYLEILEVYSTKAKNYVNGHCTKYEPWQLIAWSVVWTLLIVWGYEFVFQPESLWSRFKKKCFKLTRKMPIIGRKIQDKLNKTKDDISKNMSFLKVDKEYVKALPSQGLSSSAVLEKLKEYSSMDAFWQEGRASGTVYSGEEKLTELLVKAYGDFAWSNPLHPDIFPGLRKIEAEIVRIACSLFNGGPDSCGCVTSGGTESILMACKAYRDLAFEKGIKTPEIVAPQSAHAAFNKAASYFGMKIVRVPLTKMMEVDVRAMRRAISRNTAMLVCSTPQFPHGVIDPVPEVAKLAVKYKIPLHVDACLGGFLIVFMEKAGYPLEHPFDFRVKGVTSISADTHKYGYAPKGSSLVLYSDKKYRNYQFFVDTDWQGGIYASPTIAGSRPGGISAAAWAALMHFGENGYVEATKQIIKTARFLKSELENIKGIFVFGNPQLSVIALGSRDFDIYRLSNLMTAKGWNLNQLQFPPSIHFCITLLHARKRVAIQFLKDIRESVTQIMKNPKAKTTGMGAIYGMAQTTVDRNMVAELSSVFLDSLYSTDTVTQGSQMNGSPKPH

SEQ ID NO: 137 - protein, 1194 aa, Homo sapiens
MLITMCGYFPSRDQDNAIIRPLPKVKRLLSDSTCLPHIIQLLLTFDPILVEKVAILLYHIMQDNPQLPRLYLSGVFFFIMMYTGSNVLPVARFLKYTHTKQAFKSEETKGQDIFQRSILGHILPEAMVCYLENYEPEKFSEIFLGEFDTPEAIWSSEMRRLMIEKIAAHLADFTPRLQSNTRALYQYCPIPIINYPQLENELFCNIYYLKQLCDTLRFPDWPIKDPVKLLKDTLDAWKKEVEKKPPMMSIDDAYEVLNLPQGQGPHDESKIRKAYFRLAQKYHPDKNPEGRDMFEKVNKAYEFLCTKSAKIVDGPDPENIILILKTQSILFNRHKEDLQPYKYAGYPMLIRTITMETSDDLLFSKESPLLPAATELAFHTVNCSALNAEELRRENGLEVLQEAFSRCVAVLTRASKPSDMSVQVCGYISKCYSVAAQFEECREKITEMPSIIKDLCRVLYFGKSIPRVAALGVECVSSFAVDFWLQTHLFQAGILWYLLGFLFNYDYTLEESGIQKSEETNQQEVANSLAKLSVHALSRLGGYLAEEQATPENPTIRKSLAGMLTPYVARKLAVASVTEILKMLNSNTESPYLIWNNSTRAELLEFLESQQENMIKKGDCDKTYGSEFVYSDHAKELIVGEIFVRVYNEVPTFQLEVPKAFAASLLDYIGSQAQYLHTFMAITHAAKVESEQHGDRLPRVEMALEALRNVIKYNPGSESECIGHFKLIFSLLRVHGAGQVQQLALEVVNIVTSNQDCVNNIAESMVLSSLLALLHSLPSSRQLVLETLYALTSSTKIIKEAMAKGALIYLLDMFCNSTHPQVRAQTAELFAKMTADKLIGPKVRITLMKFLPSVFMDAMRDNPEAAVHIFEGTHENPELIWNDNSRDKVSTTVREMMLEHFKNQQDNPEANWKLPEDFAVVFGEAEGELAVGGVFLRIFIAQPAWVLRKPREFLIALLEKLTELLEKNNPHGETLETLTMATVCLFSAQPQLADQVPPLGHLPKVIQAMNHRNNAIPKSAIRVIHALSENELCVRAMASLETIGPLMNGMKKRADTVGLACEAINRMFQKEQSELVAQALKADLVPYLLKLLEGIGLENLDSPAATKAQIVKALKAMTRSLQYGEQVNEILCRSSVWSAFKDQKHDLFISESQTAGYLTGPGVAGYLTAGTSTSVMSNLPPPVDHEAGDLGYQT

SEQ ID NO: 138 - protein, 72 aa, Homo sapiens
MSSKTASTNNIAQARRTVQQLRLEASIERIKVSKASADLMSYCEEHARSDPLLIGIPTSENPFKDKKTCIIL

SEQ ID NO: 139 - protein, 398 aa, Homo sapiens
MSGSSLPSALALSLLLVSGSLLPGPGAAQNAGFVKSPMSETKLTGDAFELYCDVVGSPTPEIQWWYAEVNRAESFRQLWDGARKRRVTVNTAYGSNGVSVLRITRLTLEDSGTYECRASNDPKRNDLRQNPSITWIRAQATISVLQKPRIVTSEEVIIRDSPVLPVTLQCNLTSSSHTLTYSYWTKNGVELSATRKNASNMEYRINKPRAEDSGEYHCVYHFVSAPKANATIEVKAAPDITGHKRSENKNEGQDATMYCKSVGYPHPDWIWRKKENGMPMDIVNTSGRFFIINKENYTELNIVNLQITEDPGEYECNATNAIGSASVVTVLRVRSHLAPLWPFLGILAEIIILVVIIVVYEKRKRPDEVPDDDEPAGPMKTNSTNNHKDKNLRQRNTN

SEQ ID NO: 140 - protein, 228 aa, Homo sapiens
MTMGDKKSPTRPKRQAKPAADEGFWDCSVCTFRNSAEAFKCSICDVRKGTSTRKPRINSQLVAQQVAQQYATPPPPKKEKKEKVEKQDKEKPEKDKEISPSVTKKNTNKKTKPKSDILKDPPSEANSIQSANATTKTSETNHTSRPRLKNVDRSTAQQLAVTVGNVTVIITDFKEKTRSSSTSSSTVTSSAGSEQQNQSSSGSESTDKGSSRSSTPKGDMSAVNDESF

SEQ ID NO: 141 - protein, 396 aa, Homo sapiens
MVAGTRCLLALLLPQVLLGGAAGLVPELGRRKFAAASSGRPSSQPSDEVLSEFELRLLSMFGLKQRPTPSRDAVVPPYMLDLYRRHSGQPGSPAPDHRLERAASRANTVRSFHHEESLEELPETSGKTTRRFFFNLSSIPTEEFITSAELQVFREQMQDALGNNSSFHHRINIYEIIKPATANSKFPVTRLLDTRLVNQNASRWESFDVTPAVMRWTAQGHANHGFVVEVAHLEEKQGVSKRHVRISRSLHQDEHSWSQIRPLLVTFGHDGKGHPLHKREKRQAKHKQRKRLKSSCKRHPLYVDFSDVGWNDWIVAPPGYHAFYCHGECPFPLADHLNSTNHAIVQTLVNSVNSKIPKACCVPTELSAISMLYLDENEKVVLKNYQDMVVEGCGCR

SEQ ID NO: 142 - protein, 163 aa, Homo sapiens
MPSIKLQSSDGEIFEVDVEIAKQSVTIKTMLEDLGMDDEGDDDPVPLPNVNAAILKKVIQWCTHHKDDPPPPEDDENKEKRTDDIPVWDQEFLKVDQGTLFELILAANYLDIKGLLDVTCKTVANMIKGKTPEEIRKTFNIKNDFTEEEEAQVRKENQWCEEK

SEQ ID NO: 143 - protein, 239 aa, Homo sapiens [sequence omitted]

SEQ ID NO: 144 - protein, 175 aa, Homo sapiens
MSSQIRQNYSTDVEAAVNSLVNLYLQASYTYLSLGFYFDRDDVALEGVSHFFRELAEEKREGYERLLKMQNQRGGRALFQDIKKPAEDEWGKTPDAMKAAMALEKKLNQALLDLHALGSARTDPHLCDFLETHFLDEEVKLIKKMGDHLTNLHRLGGPEAGLGEYLFERLTLKHD

SEQ ID NO: 145 - protein, 903 aa, Homo sapiens
MSDSGSQLGSMGSLTMKSQLQITVISAKLKENKKNWFGPSPYVEVTVDGQSKKTEKCNNTNSPKWKQPLTVIVTPVSKLHFRVWSHQTLKSDVLLGTAALDIYETLKSNNMKLEEVVVTLQLGGDKEPTETIGDLSICLDGLQLESEVVTNGETTCSENGVSLCLPRLECNSAISAHCNLCLPGLSDSPISASRVAGFTGASQNDDGSRSKDETRVSTNGSDDPEDAGAGENRRVSGNNSPSLSNGGFKPSRPPRPSRPPPPTPRRPASVNGSPSATSESDGSSTGSLPPTNTNTNTSEGATSGLIIPLTISGGSGPRPLNPVTQAPLPPGWEQRVDQHGRVYYVDHVEKRTTWDRPEPLPPGWERRVDNMGRIYYVDHFTRTTTWQRPTLESVRNYEQWQLQRSQLQGAMQQFNQRFIYGNQDLFATSQSKEFDPLGPLPPGWEKRTDSNGRVYFVNHNTRITQWEDPRSQGQLNEKPLPEGWEMRFTVDGIPYFVDHNRRTTTYIDPRTGKSALDNGPQIAYVRDFKAKVQYFRFWCQQLAMPQHIKITVTRKTLFEDSFQQIMSFSPQDLRRRLWVIFPGEEGLDYGGVAREWFFLLSHEVLNPMYCLFEYAGKDNYCLQINPASYINPDHLKYFRFIGRFIAMALFHGKFIDTGFSLPFYKRILNKPVGLKDLESIDPEFYNSLIWVKENNIEECDLEMYFSVDKEILGEIKSHDLKPNGGNILVTEENKEEYIRMVAEWRLSRGVEEQTQAFFEGFNEILPQQYLQYFDAKELEVLLCGMQEIDLNDWQRHAIYRHYARTSKQIMWFWQFVKEIDNEKRMRLLQFVTGTCRLPVGGFADLMGSNGPQKFCIEKVGKENWLPRSHTCFNRLDLPPYKSYEQLKEKLLFAIEETEGFGQE

SEQ ID NO: 146 - protein, 434 aa, Homo sapiens
MSILKIHAREIFDSRGNPTVEVDLFTSKGLFRAAVPSGASTGIYEALELRDNDKTRYMGKGVSKAVEHINKTIAPALVSKKLNVTEQEKIDKLMIEMDGTENKSKFGANAILGVSLAVCKAGAVEKGVPLYRHIADLAGNSEVILPVPAFNVINGGSHAGNKLAMQEFMILPVGAANFREAMRIGAEVYHNLKNVIKEKYGKDATNVGDEGGFAPNILENKEGLELLKTAIGKAGYTDKVVIGMDVAASEFFRSGKYDLDFKSPDDPSRYISPDQLADLYKSFIKDYPVVSIEDPFDQDDWGAWQKFTASAGIQVVGDDLTVTNPKRIAKAVNEKSCNCLLLKVNQIGSVTESLQACKLAQANGWGVMVSHRSGETEDTFIADLVVGLCTGQIKTGAPCRSERLAKYNQLLRIEEELGSKAKFAGRNFRNPLAK

SEQ ID NO: 147 - protein, 449 aa, Homo sapiens
MMLSTEGREGFVVKVRGLPWSCSADEVMRFFSDCKIQNGTSGIRFIYTREGRPSGEAFVELESEEEVKLALKKDRETMGHRYVEVFKSNSVEMDWVLKHTGPNSPDTANDGFVRLRGLPFGCSKEEIVQFFSGLEIVPNGMTLPVDFQGRSTGEAFVQFASQEIAEKALKKHKERIGHRYIEIFKSSRAEVRTHYDPPRKLMAMQRPGPYDRPGAGRGYNSIGRGAGFERMRRGAYGGGYGGYDDYGGYNDGYGFGSDRFGRDLNYCFSGMSDHRYGDGGSSFQSTTGHCVHMRGLPYRATENDIYNFFSPLNPMRVHIEIGPDGRVTGEADVEFATHEDAVAAMAKDKANMQHRYVELFLNSTAGTSGGAYDHSYVELFLNSTAGASGGAYGSQMMGGMGLSNQSSYGGPASQQLSGGYGGGYGGQSSMSGYDQVLQENSSDYQSNLA

SEQ ID NO: 148 - protein, 798 aa, Homo sapiens
MSFDPNLLHNNGHNGYPNGTSAALRETGVIEKLLTSYGFIQCSERQARLFFHCSQYNGNLQDLKVGDDVEFEVSSDRRTGKPIAVKLVKIKQEILPEERMNGQVVCAVPHNLESKSPAAPGQSPTGSVCYERNGEVFYLTYTPEDVEGNVQLETGDKINFVIDNNKHTGAVSARNIMLLKKKQARCQGVVCAMKEAFGFIERGDVVKEIFFHYSEFKGDLETLQPGDDVEFTIKDRNGKEVATDVRLLPQGTVIFEDISIEHFEGTVTKVIPKVPSKNQNDPLPGRIKVDFVIPKELPFGDKDTKSKVTLLEGDHVRFNISTDRRDKLERATNIEVLSNTFQFTNEAREMGVIAAMRDGFGFIKCVDRDVRMFFHFSEILDGNQLHIADEVEFTVVPDMLSAQRNHAIRIKKLPKGTVSFHSHSDHRFLGTVEKEATFSNPKTTSPNKGKEKEAEDGIIAYDDCGVKLTIAFQAKDVEGSTSPQIGDKVEFSISDKQRPGQQVATCVRLLGRNSNSKRLLGYVATLKDNFGFIETANHDKEIFFHYSEFSGDVDSLELGDMVEYSLSKGKGNKVSAEKVNKTHSVNGITEEADPTIYSGKVIRPLRSVDPTQTEYQGMIEIVEEGDMKGEVYPFGIVGMANKGDCLQKGESVKFQLCVLGQNAQTMAYNITPLRRATVECVKDQFGFINYEVGDSKKLFFHVKEVQDGIELQAGDEVEFSVILNQRTGKCSACNVWRVCEGPKAVAAPRPDRLVNRLKNITLDDASAPRLMVLRQPRGPDNSMGFGAERKIRQAGVID

SEQ ID NO: 149 - protein, 513 aa, Homo sapiens
MFADRWLFSTNHKDIGTLYLLFGAWAGVLGTALSLLIRAELGQPGNLLGNDHIYNVIVTAHAFVMIFFMVMPIMIGGFGNWLVPLMIGAPDMAFPRMNNMSFWLLPPSLLLLLASAMVEAGAGTGWTVYPPLAGNYSHPGASVDLTIFSLHLAGVSSILGAINFITTIINMKPPAMTQYQTPLFVWSVLITAVLLLLSLPVLAAGITMLLTDRNLNTTFFDPAGGGDPILYQHLFWFFGHPEVYILILPGFGMISHIVTYYSGKKEPFGYMGMVWAMMSIGFLGFIVWAHHMFTVGMDVDTRAYFTSATMIIAIPTGVKVFSWLATLHGSNMKWSAAVLWALGFIFLFTVGGLTGIVLANSSLDIVLHDTYYVVAHFHYVLSMGAVFAIMGGFIHWFPLFSGYTLDQTYAKIHFTIMFIGVNLTFFPQHFLGLSGMPRRYSDYPDAYTTWNILSSVGSFISLTAVMLMIFMIWEAFASKRKVLMVEEPSMNLEWLYGCPPPYHTFEEPVYMKS

SEQ ID NO: 150 - protein, 494 aa, Homo sapiens
MSTTLLSAFYDVDFLCKTEKSLANLNLNNMLDKKAVGTPVAAAPSSGFAPGFLRRHSASNLHALAHPAPSPGSCSPKFPGAANGSSCGSAAAGGPTSYGTLKEPSGGGGTALLNKENKFRDRSFSENGDRSQHLLHLQQQQKGGGGSQINSTRYKTELCRPFEESGTCKYGEKCQFAHGFHELRSLTRHPKYKTELCRTFHTIGFCPYGPRCHFIHNADERRPAPSGGASGDLRAFGTRDALHLGFPREPRPKLHHSLSFSGFPSGHHQPPGGLESPLLLDSPTSRTPPPPSCSSASSCSSSASSCSSASAASTPSGAPTCCASAAAAAAAALLYGTGGAEDLLAPGAPCAACSSASCANNAFAFGPELSSLITPLAIQTHNFAAVAAAAYYRSQQQQQQQGLAPPAQPPAPPSATLPAGAAAPPSPPFSFQLPRRLSDSPVFDAPPSPPDSLSDRDSYLSGSLSSGSLSGSESPSLDPGRRLPIFSRLSISDD

SEQ ID NO: 151 - protein, 149 aa, Homo sapiens [sequence omitted]

SEQ ID NO: 152 - protein, 543 aa, Homo sapiens
MGTSLSPNDPWPLNPLSIQQTTLLLLLSVLATVHVGQRLLRQRRRQLRSAPPGPFAWPLIGNAAAVGQAAHLSFARLARRYGDVFQIRLGSCPIVVLNGERAIHQALVQQGSAFADRPAFASFRVVSGGRSMAFGHYSEHWKVQRRAAHSMMRNFFTRQPRSRQVLEGHVLSEARELVALLVRGSADGAFLDPRPLTVVAVANVMSAVCFGCRYSHDDPEFRELLSHNEEFGRTVGAGSLVDVMPWLQYFPNPVRTVFREFEQLNRNFSNFILDKFLRHCESLRPGAAPRDMMDAFILSAEKKAAGDSHGGGARLDLENVPATITDIFGASQDTLSTALQWLLLLFTRYPDVQTRVQAELDQVVGRDRLPCMGDQPNLPYVLAFLYEAMRFSSFVPVTIPHATTANTSVLGYHIPKDTVVFVNQWSVNHDPVKWPNPENFDPARFLDKDGLINKDLTSRVMIFSVGKRRCIGEELSKMQLFLFISILAHQCDFRANPNEPAKMNFSYGLTIKPKSFKVNVTLRESMELLDSAVQNLQAKETCQ

SEQ ID NO: 153 - protein, 322 aa, Homo sapiens
MASSSSLVPDRLRLPLCFLGVFVCYFYYGILQEKITRGKYGEGAKQETFTFALTLVFIQCVINAVFAKILIQFFDTARVDRTRSWLYAACSISYLGAMVSSNSALQFVNYPTQVLGKSCKPIPVMLLGVTLLKKKYPLAKYLCVLLIVAGVALFMYKPKKVVGIEEHTVGYGELLLLLSLTLDGLTGVSQDHMRAHYQTGSNHMMLNINLWSTLLLGMGILFTGELWEFLSFAERYPAIIYNILLFGLTSALGQSFIFMTVVYFGPLTCSIITTTRKFFTILASVILFANPISPMQWVGTVLVFLGLGLDAKFGKGAKKTSH

SEQ ID NO: 154 - protein, 1944 aa, Homo sapiens
MSNFYEERTTMIAARDLQEFVPFGRDHCKHHPNALNLQLRQLQPASELWSSDGAAGLVGSLQEVTIHEKQKESWQLRKGVSEIGEDVDYDEELYVAGNMVIWSKGSKSQALAVYKAFTVDSPVQQALWCDFIISQDKSEKAYSSNEVEKCICILQSSCINMHSIEGKDYIASLPFQVANVWPTKYGLLFERSASSHEVPPGSPREPLPTMFSMLHPLDEITPLVCKSGSLFGSSRVQYVVDHAMKIVFLNTDPSIVMTYDAVQNVHSVWTLRRVKSEEENVVLKFSEQGGTPQNVATSSSLTAHLRSLSKGDSPVTSPFQNYSSIHSQSRSTSSPSLHSRSPSISNMAALSRAHSPALGVHSFSGVQRFNISSHNQSPKRHSISHSPNSNSNGSFLAPETEPIVPELCIDHLWTETITNIREKNSQASKVFITSDLCGQKFLCFLVESQLQLRCVKFQESNDKTQLIFGSVTNIPAKDAAPVEKIDTMLVLEGSGNLVLYTGVVRVGKVFIPGLPAPSLTMSNTMPRPSTPLDGVSTPKPLSKLLGSLDEVVLLSPVPELRDSSKLHDSLYNEDCTFQQLGTYIHSIRDPVHNRVTLELSNGSMVRITIPEIATSELVQTCLQAIKFILPKEIAVQMLVKWYNVHSAPGGPSYHSEWNLFVTCLMNMMGYNTDRLAWTRNFDFEGSLSPVIAPKKARPSETGSDDDWEYLLNSDYHQNVESHLLNRSLCLSPSEASQMKDEDFSQNLSLDSSTLLFTHIPAIFFVLHLVYEELKLNTLMGEGICSLVELLVQLARDLKLGPYVDHYYRDYPTLVRTTGQVCTIDPGQTGFMHHPSFFTSEPPSIYQWVSSCLKGEGMPPYPYLPGICERSRLVVLSIALYILGDESLVSDESSQYLTRITIAPQKLQVEQEENRFSFRHSTSVSSLAERLVVWMTNVGFTLRDLETLPFGIALPIRDAIYHCREQPASDWPEAVCLLIGRQDLSKQACEGNLPKGKSVLSSDVPSGTETEEEDDGMNDMNHEVMSLIWSEDLRVQDVRRLLQSAHPVRVNVVQYPELSDHEFIEEKENRLLQLCQRTMALPVGRGMFTLFSYHPVPTEPLPIPKLNLTGRAPPRNTTVDLNSGNIDVPPNMTSWASFHNGVAAGLKIAPASQIDSAWIVYNKPKHAELANEYAGFLMALGLNGHLTKLATLNIHDYLTKGHEMTSIGLLLGVSAAKLGTMDMSITRLLSIHIPALLPPTSTELDVPHNVQVAAVVGIGLVYQGTAHRHTAEVLLAEIGRPPGPEMEYCTDRESYSLAAGLALGMVCLGHGSNLIGMSDLNVPEQLYQYMVGGHRRFQTGMHREKHKSPSYQIKEGDTINVDVTCPGATLALAMIYLKTNNRSIADWLRAPDTMYLLDFVKPEFLLLRTLARCLILWDDILPNSKWVDSNVPQIIRENSISLSEIELPCSEDLNLETLSQAHVYIIAGACLSLGFRFAGSENLSAFNCLHKFAKDFMTYLSAPNASVTGPHNLETCLSVVLLSLAMVMAGSGNLKVLQLCRFLHMKTGGEMNYGFHLAHHMALGLLFLGGGRYSLSTSNSSIAALLCALYPHFPAHSTDNRYHLQALRHLYVLAAEPRLLVPVDVDTNTPCYALLEVTYKGTQWYEQTKEELMAPTLLPELHLLKQIKVKGPRYWELLIDLSKGTQHLKSILSKDGVLYVKLRAGQLSYKEDPMGWQSLLAQTVANRNSEARAFKPETISAFTSDPALLSFAEYFCKPTVNMGQKQEILDLFSSVLYECVTQETPEMLPAYIAMDQAIRRLGRREMSETSELWQIKLVLEFFSSRSHQERLQNHPKRGLFMNSEFLPVVKCTIDNTLDQWLQVGGDMCVHAYLSGQPLEESQLSMLACFLVYHSVPAPQHLPPIGLEGSTSFAELLFKFKQLKMPVRALLRLAPLLLGNPQPMVM

SEQ ID NO: 155 - protein, 184 aa, Homo sapiens
MAEPQPPSGGLTDEAALSCCSDADPSTKDFLLQQTMLRVKDPKKSLDFYTRVLGMTLIQKCDFPIMKFSLYFLAYEDKNDIPKEKDEKIAWALSRKATLELTHNWGTEDDATQSYHNGNSDPRGFGHIGIAVPDVYSACKRFEELGVKFVKKPDDGKMKGLAFIQDPDGYWIEILNPNKMATLM

SEQ ID NO: 156 - protein, 204 aa, Homo sapiens [sequence omitted]

SEQ ID NO: 157 - protein, 1304 aa, Homo sapiens
MAKIAKTHEDIEAQIREIQGKKAALDEAQGVGLDSTGYYDQEIYGGSDSRFAGYVTSIAATELEDDDDDYSSSTSLLGQKKPGYHAPVALLNDIPQSTEQYDPFAEHRPPKIADREDEYKKHRRTMIISPERLDPFADGGKTPDPKMNVRTYMDVMREQHLTKEEREIRQQLAEKAKAGELKVVNGAAASQPPSKRKRRWDQTADQTPGATPKKLSSWDQAETPGHTPSLRWDETPGRAKGSETPGATPGSKIWDPTPSHTPAGAATPGRGDTPGHATPGHGGATSSARKNRWDETPKTERDTPGHGSGWAETPRTDRGGDSIGETPTPGASKRKSRWDETPASQMGGSTPVLTPGKTPIGTPAMNMATPTPGHIMSMTPEQLQAWRWEREIDERNRPLSDEELDAMFPEGYKVLPPPAGYVPIRTPARKLTATPTPLGGMTGFHMQTEDRTMKSVNDQPSGNLPFLKPDDIQYFDKLLVDVDESTLSPEEQKERKIMKLLLKIKNGTPPMRKAALRQITDKAREFGAGPLFNQILPLLMSPTLEDQERHLLVKVIDRILYKLDDLVRPYVHKILVVIEPLLIDEDYYARVEGLEIISNLAKAAGLATMISTMRPDIDNMDEYVRNTTARAFAVVASALGIPSLLPFLKAVCKSKKSWQARHTGIKIVQQIAILMGCAILPHLRSLVEIIEHGLVDEQQKVRTISALAIAALAEAATPYGIESFDSVLKPLWKGIRQHRGKGLAAFLKAIGYLIPLMDAEYANYYTREVMLILIREFQSPDEEMKKIVLKVVKQCCGTDGVEANYIKTEILPPFFKHFWQHRMALDRRNYRQLVDTTVELANKVGAAEIISRIVDDLKDEAEQYRKMVMETIEKIMGNLGAADIDHKLEEQLIDGILYAFQEQTTEDSVMLNGFGTVVNALGKRVKPYLPQICGTVLWRLNNKSAKVRQQAADLISRTAVVMKTCQEEKLMGHLGVVLYEYLGEEYPEVLGSILGALKAIVNVIGMHKMTPPIKDLLPRLTPILKNRHEKVQENCIDLVGRIADRGAEYVSAREWMRICFELLELLKAHKKAIRRATVNTFGYIAKAIGPHDVLATLLNNLKVQERQNRVCTTVAIAIVAETCSPFTVLPALMNEYRVPELNVQNGVLKSLSFLFEYIGEMGKDYIYAVTPLLEDALMDRDLVHRQTASAVVQHMSLGVYGFGCEDSLNHLLNYVWPNVFETSPHVIQAVMGALEGLRVAIGPCRMLQYCLQGLFHPARKVRDVYWKIYNSIYIGSQDALIAHYPRIYNDDKNTYIRYELDYIL

SEQ ID NO: 158 - protein, 1782 aa, Homo sapiens
MGAGSSTEQRSPEQPPEGSSTPAEPEPSGGGPSAEAAPDTTADPAIAASDPATKLLQKNGQLSTINGVAEQDELSLQEGDLNGQKGALNGQGALNSQEEEEVIVTEVGQRDSEDVSKRDSDKEMATKSAVVHDITDDGQEETPEIIEQIPSSESNLEELTQPTESQANDIGFKKVFKFVGFKFTVKKDKTEKPDTVQLLTVKKDEGEGAAGAGDHKDPSLGAGEAASKESEPKQSTEKPEETLKREQSHAEISPPAESGQAVEECKEEGEEKQEKEPSKSAESPTSPVTSETGSTFKKFFTQGWAGWRKKTSFRKPKEDEVEASEKKKEQEPEKVDTEEDGKAEVASEKLTASEQAHPQEPAESAHEPRLSAEYEKVELPSEEQVSGSQGPSEEKPAPLATEVFDEKIEVHQEEVVAEVHVSTVEERTEEQKTEVEETAGSVPAEELVEMDAEPQEAEPAKELVKLKETCVSGEDPTQGADLSPDEKVLSKPPEGVVSEVEMLSSQERMKVQGSPLKKLFTSTGLKKLSGKKQKGKRGGGDEESGEHTQVPADSPDSQEEQKGESSASSPEEPEEITCLEKGLAEVQQDGEAEEGATSDGEKKREGVTPWASFKKMVTPKKRVRRPSESDKEDELDKVKSATLSSTESTASEMQEEMKGSVEEPKPEEPKRKVDTSVSWEALICVGSSKKRARRGSSSDEEGGPKAMGGDHQKADEAGKDKETGTDGILAGSQEHDPGQGSSSPEQAGSPTEGEGVSTWESFKRLVTPRKKSKSKLEEKSEDSIAGSGVEHSTPDTEPGKEESWVSIKKFIPGRRKKRPDGKQEQAPVEDAGPTGANEDDSDVPAVVPLSEYDAVEREKMEAQQAQKSAEQPEQKAATEVSKELSESQVHMMAAAVADGTRAATIIEERSPSWISASVTEPLEQVEAEAALLTEEVLEREVIAEEEPPTVTEPLPENREARGDTVVSEAELTPEAVTAAETAGPLGAEEGTEASAAEETTEMVSAVSQLTDSPDTTEEATPVQEVEGGVPDIEEQERRTQEVLQAVAEKVKEESQLPGTGGPEDVLQPVQRAEAERPEEQAEASGLKKETDVVLKVDAQEAKTEPFTQGKVVGQTTPESFEKAPQVTESIESSELVTTCQAETLAGVKSQEMVMEQAIPPDSVETPTDSETDGSTPVADFDAPGTTQKDEIVEIHEENEVASGTQSGGTEAEAVPAQKERPPAPSSFVFQEETKEQSKMEDTLEHTDKEVSVETVSILSKTEGTQEADQYADEKTKDVPFFEGLEGSIDTGITVSREKVTEVALKGEGTEEAECKKDDALELQSHAKSPPSPVEREMVVQVEREKTEAEPTHVNEEKLEHETAVTVSEEVSKQLLQTVNVPIIDGAKEVSSLEGSPPPCLGQEEAVCTKIQVQSSEASFTLTAAAEEEKVLGETANILETGETLEPAGAHLVLEEKSSEKNEDFAAHPGEDAVPTGPDCQAKSTPVIVSATTKKGLSSDLEGEKTTSLKWKSDEVDEQVACQEVKVSVAIEDLEPENGILELETKSSKLVQNIIQTAVDQFVRTEETATEMLTSELQTQAHVIKADSQDAGQETEKEGEEPQASAQDETPITSAKEESESTAVGQAHSDISKDMSEASEKTMTVEVEGSTVNDQQLEEVVLPSEEEGGGAGTKSVPEDDGHALLAERIEKSLVEPKEDEKGDDVDDPENQNSALADTDASGGLTKESPDTNGPKQKEKEDAQEVELQEGKVHSESDKAITPQAQEELQKQERESAKSELTES

SEQ ID NO: 159 - protein, 646 aa, Homo sapiens
MSKGPAVGIDLGTTYSCVGVFQHGKVEIIANDQGNRTTPSYVAFTDTERLIGDAAKNQVAMNPTNTVFDAKRLIGRRFDDAVVQSDMKHWPFMVVNDAGRPKVQVEYKGETKSFYPEEVSSMVLTKMKEIAEAYLGKTVTNAVVTVPAYFNDSQRQATKDAGTIAGLNVLRIINEPTAAAIAYGLDKKVGAERNVLIFDLGGGTFDVSILTIEDGIFEVKSTAGDTHLGGEDFDNRMVNHFIAEFKRKHKKDISENKRAVRRLRTACERAKRTLSSSTQASIEIDSLYEGIDFYTSITRARFEELNADLFRGTLDPVEKALRDAKLDKSQIHDIVLVGGSTRIPKIQKLLQDFFNGKELNKSINPDEAVAYGAAVQAAILSGDKSENVQDLLLLDVTPLSLGIETAGGVMTVLIKRNTTIPTKQTQTFTTYSDNQPGVLIQVYEGERAMTKDNNLLGKFELTGIPPAPRGVPQIEVTFDIDANGILNVSAVDKSTGKENKITITNDKGRLSKEDIERMVQEAEKYKAEDEKQRDKVSSKNSLESYAFNMKATVEDEKLQGKINDEDKQKILDKCNEIINWLDKNQTAEKEEFEHQQKELEKVCNPIITKLYQSAGGMPGGMPGGFPGGGAPPSGGASSGPTIEEVD

SEQ ID NO: 160 - protein, 500 aa, Homo sapiens
MSNSVPLLCFWSLCYCFAAGSPVPFGPEGRLEDKLHKPKATQTEVKPSVRFNLRTSKDPEHEGCYLSVGHSQPLEDCSFNMTAKTFFIIHGWTMSGIFENWLHKLVSALHTREKDANVVVVDWLPLAHQLYTDAVNNTRVVGHSIARMLDWLQEKDDFSLGNVHLIGYSLGAHVAGYAGNFVKGTVGRITGLDPAGPMFEGADIHKRLSPDDADFVDVLHTYTRSFGLSIGIQMPVGHIDIYPNGGDFQPGCGLNDVLGSIAYGTITEVVKCEHERAVHLFVDSLVNQDKPSFAFQCTDSNRFKKGICLSCRKNRCNSIGYNAKKMRNKRNSKMYLKTRAGMPFRVYHYQMKIHVFSYKNMGEIEPTFYVTLYGTNADSQTLPLEIVERIEQNATNTFLVYTEEDLGDLLKIQLTWEGASQSWYNLWKEFRSYLSQPRNPGRELNIRRIRVKSGETQRKLTFCTEDPENTSISPGRELWFRKCRDGWRMKNETSPTVELP

SEQ ID NO: 161 - protein, 219 aa, Homo sapiens
MVKYFLGQSVLRSSWDQVFAAFWQRYPNPYSKHVLTEDIVHREVTPDQKLLSRRLLTKTNRMPRWAERLFPANVAHSVYVLEDSIVDPQNQTMTTFTWNINHARLMVVEERCVYCVNSDNSGWTEIRREAWVSSSLFGVSRAVQEFGLARFKSNVTKTMKGFEYILAKLQGEAPSKTLVETAKEAKEKAKETALAATEKAKDLASKAATKKQQQQQQFV

SEQ ID NO: 162 - protein, 191 aa, Homo sapiens
MAAYSYRPGPGAGPGPAAGAALPDQSFLWNVFQRVDKDRSGVISDTELQQALSNGTWTPFNPVTVRSIISMFDRENKAGVNFSEFTGVWKYITDWQNVFRTYDRDNSGMIDKNELKQALSGFGYRLSDQFHDILIRKFDRQGRGQIAFDDFIQGCIVLQRLTDIFRRYDTDQDGWIQVSYEQYLSMVFSIV

SEQ ID NO: 163 - protein, 425 aa, Homo sapiens
MGEDAAQAEKFQHPGSDMRQEKPSSPSPMPSSTPSPSLNLGNTEEAIRDNSQVNAVTVLTLLDKLVNMLDAVQENQHKMEQRQISLEGSVKGIQNDLTKLSKYQASTSNTVSKLLEKSRKVSAHTRAVKERMDRQCAQVKRLENNHAQLLRRNHFKVLIFQEENEIPASVFVKQPVSGAVEGKEELPDENKSLEETLHTVDLSSDDDLPHDEEALEDSAEEKVEESRAEKIKRSSLKKVDSLKKAFSRQNIEKKMNKLGTKIVSVERREKIKKSLTSNHQKISSGKSSPFKVSPLTFGRKKVREGESHAENETKSEDLPSSEQMPNDQEEESFAEGHSEASLASALVEGEIAEEAAEKATSRGSNSGMDSNIDLTIVEDEEEESVALEQAQKVRYEGSYALTSEEAERSDGDPVQPAVLQVHQTS

SEQ ID NO: 164 - protein, 558 aa, Homo sapiens
MAALTRDPQFQKLQQWYREHRSELNLRRLFDANKDRFNHFSLTLNTNHGHILVDYSKNLVTEDVMRMLVDLAKSRGVEAARERMFNGEKINYTEGRAVLHVALRNRSNTPILVDGKDVMPEVNKVLDKMKSFCQRVRSGDWKGYTGKTITDVINIGIGGSDLGPLMVTEALKPYSSGGPRVWYVSNIDGTHIAKTLAQLNPESSLFIIASKTFTTQETITNAETAKEWFLQAAKDPSAVAKHFVALSTNTTKVKEFGIDPQNMFEFWDWVGGRYSLWSAIGLSIALHVGFDNFEQLLSGAHWMDQHFRTTPLEKNAPVLLALLGIWYINCFGCETHAMLPYDQYLHRFAAYFQQGDMESNGKYITKSGTRVDHQTGPIVWGEPGTNGQHAFYQLIHQGTKMIPCDFLIPVQTQHPIRKGLHHKILLANFLAQTEALMRGKSTEEARKELQAAGKSPEDLERLLPHKVFEGNRPTNSIVFTKLTPFMLGALVAMYEHKIFVQGIIWDINSFDQWGVELGKQLAKKIEPELDGSAQVTSHDASTNGLINFIKQQREARVQ

SEQ ID NO: 165 - protein, 260 aa, Homo sapiens
MTHQSHAYHMVKPSPWPLTGALSALLMTSGLAMWFHFHSMTLLMLGLLTNTLTMYQWWRDVTRESTYQGHHTPPVQKGLRYGMILFITSEVFFFAGFFWAFYHSSLAPTPQLGGHWPPTGITPLNPLEVPLLNTSVLLASGVSITWAHHSLMENNRNQMIQALLITILLGLYFTLLQASEYFESPFTISDGIYGSTFFVATGFHGLHVIIGSTFLTICFIRQLMFHFTSKHHFGFEAAAWYWHFVDVVWLFLYVSIYWWG

SEQ ID NO: 166 - protein, 198 aa, Homo sapiens
MEDAAALELSSDEAVEVEEVIEESRAERIKRSGLRRVDDFKKAFSKEKMEKTKVRTRENLEKTRLKTKENLEKTRHTLEKRMNKLGTRLVPAERREKLKTSRDKLRKSFTPDHVVYARSKTAVYKVPPFTFHVKKIREGQVEVLKATEMVEVGADDDEGGAERGEAGDLRRGSSPDVHALLEITEESDAVLVDKSDSD

SEQ ID NO: 167 - protein, 289 aa, Homo sapiens
MELLCHEVDPVRRAVRDRNLLRDDRVLQNLLTIEERYLPQCSYFKCVQKDIQPYMRRMVATWMLEVCEEQKCEEEVFPLAMNYLDRFLAGVPTPKSHLQLLGAVCMFLASKLKETSPLTAEKLCIYTDNSIKPQELLEWELVVLGKLKWNLAAVTPHDFIEHILRKLPQQREKLSLIRKHAQTFIALCATDFKFAMYPPSMIATGSVGAAICGLQQDEEVSSLTCDALTELLAKITNTDVDCLKACQEQIEAVLLNSLQQYRQDQRDGSKSEDELDQASTPTDVRDIDL

SEQ ID NO: 168 - protein, 990 aa, Homo sapiens
MSEETRQSKLAAAKKKLREYQQRNSPGVPTGAKKKKKIKNGSNPETTTSGGCHSPEDTPKDNAATLQPSDDTVLPGGVPSPGASLTSMAASQNHDADNVPNLMDETKTFSSTESLRQLSQQLNGLVCESATCVNGEGPASSANLKDLESRYQQLAVALDSSYVTNKQLNITIEKLKQQNQEITDQLEEEKKECHQKQGALREQLQVHIQTIGILVSEKAELQTALAHTQHAARQKEGESEDLASRLQYSRRRVGELERALSAVSTQQKKADRYNKELTKERDALRLELYKNTQSNEDLKQEKSELEEKLRVLVTEKAGMQLNLEELQKKLEMTELLLQQFSSRCEAPDANQQLQQAMEERAQLEAHLGQVMESVRQLQMERDKYAENLKGESAMWRQRMQQMSEQVHTLREEKECSMSRVQELETSLAELRNQMAEPPPPEPPAGPSEVEQQLQAEAEHLRKELEGLAGQLQAQVQDNEGLSRLNREQEERLLELERAAELWGEQAEARRQILETMQNDRTTISRALSQNRELKEQLAELQSGFVKLTNENMEITSALQSEQHVKRELGKKLGELQEKLSELKETVELKSQEAQSLQQQRDQYLGHLQQYVAAYQQLTSEKEVLHNQLLLQTQLVDQLQQQEAQGKAVAEMARQELQETQERLEAATQQNQQLRAQLSLMAHPGEGDGLDREEEEDEEEEEEEAVAVPQPMPSIPEDLESREAMVAFFNSAVASAEEEQARLRGQLKEQRVRCRRLAHLLASAQKEPEAAAPAPGTGGDSVCGETHRALQGAMEKLQSRFMELMQEKADLKERVEELEHRCIQLSGETDTIGEYIALYQSQRAVLKERHREKEEYISRLAQDKEEMKVKLLELQELVLRLVGDRNEWHGRFLAAAQNPADEPTSGAPAPQELGAANQQGDLCEVSLAGSVEPAQGEAREGSPRDNPTAQQIMQLLREMQNPRERPGLGSNPCIPFFYRADENDEVKITVI

SEQ ID NO: 169 - protein, 178 aa, Homo sapiens [sequence omitted]

SEQ ID NO: 170 - protein, 462 aa, Homo sapiens
MGKEKTHINIVVIGHVDSGKSTTTGHLIYKCGGIDKRTIEKFEKEAAEMGKGSFKYAWVLDKLKAERERGITIDISLWKFETSKYYVTIIDAPGHRDFIKNMITGTSQADCAVLIVAAGVGEFEAGISKNGQTREHALLAYTLGVKQLIVGVNKMDSTEPPYSQKRYEEIVKEVSTYIKKIGYNPDTVAFVPISGWNGDNMLEPSANMPWFKGWKVTRKDGNASGTTLLEALDCILPPTRPTDKPLRLPLQDVYKIGGIGTVPVGRVETGVLKPGMVVTFAPVNVTTEVKSVEMHHEALSEALPGDNVGFNVKNVSVKDVRRGNVAGDSKNDPPMEAAGFTAQVIILNHPGQISAGYAPVLDCHTAHIACKFAELKEKIDRRSGKKLEDGPKFLKSGDAAIVDMVPGKPMCVESFSDYPPLGRFAVRDMRQTVAVGVIKAVDKKAAGAGKVTKSAQKAQKAK

SEQ ID NO: 171 - protein, 1023 aa, Homo sapiens
MGKGVGRDKYEPAAVSEQGDKKGKKGKKDRDMDELKKEVSMDDHKLSLDELHRKYGTDLSRGLTSARAAEILARDGPNALTPPPTTPEWIKFCRQLFGGFSMLLWIGAILCFLAYSIQAATEEEPQNDNLYLGVVLSAVVIITGCFSYYQEAKSSKIMESFKNMVPQQALVIRNGEKMSINAEEVVVGDLVEVKGGDRIPADLRIISANGCKVDNSSLTGESEPQTRSPDFTNENPLETRNIAFFSTNCVEGTARGIVVYTGDRTVMGRIATLASGLEGGQTPIAAEIEHFIHIITGVAVFLGVSFFILSLILEYTWLEAVIFLIGIIVANVPEGLLATVTVCLTLTAKRMARKNCLVKNLEAVETLGSTSTICSDKTGTLTQNRMTVAHMWFDNQIHEADTTENQSGVSFDKTSATWLALSRIAGLCNRAVFQANQENLPILKRAVAGDASESALLKCIELCCGSVKEMRERYAKIVEIPFNSTNKYQLSIHKNPNTSEPQHLLVMKGAPERILDRCSSILLHGKEQPLDEELKDAFQNAYLELGGLGERVLGFCHLFLPDEQFPEGFQFDTDDVNFPIDNLCFVGLISMIDPPRAAVPDAVGKCRSAGIKVIMVTGDHPITAKAIAKGVGIISEGNETVEDIAARLNIPVSQVNPRDAKACVVHGSDLKDMTSEQLDDILKYHTEIVFARTSPQQKLIIVEGCQRQGAIVAVTGDGVNDSPALKKADIGVAMGIAGSDVSKQAADMILLDDNFASIVTGVEEGRLIFDNLKKSIAYTLTSNIPEITPFLIFIIANIPLPLGTVTILCIDLGTDMVPAISLAYEQAESDIMKRQPRNPKTDKLVNERLISMAYGQIGMIQALGGFFTYFVILAENGFLPIHLLGLRVDWDDRWINDVEDSYGQQWTYEQRKIVEFTCHTAFFVSIVVVQWADLVICKTRRNSVFQQGMKNKILIFGLFEETALAAFLSYCPGMGVALRMYPLKPTWWFCAFPYSLLIFVYDEVRKLIIRRRPGGWVEKETYY

SEQ ID NO: 172 - protein, 789 aa, Homo sapiens
MTSFQEVPLQTSNFAHVIFQNVAKSYLPNAHLECHYTLTPYIHPHPKDWVGIFKVGWSTARDYYTFLWSPMPEHYVEGSTVNCVLAFQGYYLPNDDGEFYQFCYVTHKGEIRGASTPFQFRASSPVEELLTMEDEGNSDMLVVTTKAGLLELKIEKTMKEKEELLKLIAVLEKETAQLREQVGRMERELNHEKERCDQLQAEQKGLTEVTQSLKMENEEFKKRFSDATSKAHQLEEDIVSVTHKAIEKETELDSLKDKLKKAQHEREQLECQLKTEKDEKELYKVHLKNTEIENTKLMSEVQTLKNLDGNKESVITHFKEEIGRLQLCLAEKENLQRTFLLTTSSKEDTCFLKEQLRKAEEQVQATRQEVVFLAKELSDAVNVRDRTMADLHTARLENEKVKKQLADAVAELKLNAMKKDQDKTDTLEHELRREVEDLKLRLQMAADHYKEKFKECQRLQKQINKLSDQSANNNNVFTKKTGNQQKVNDASVNTDPATSASTVDVKPSPSAAEADFDIVTKGQVCEMTKEIADKTEKYNKCKQLLQDEKAKCNKYADELAKMELKWKEQVKIAENVKLELAEVQDNYKELKRSLENPAERKMEGQNSQSPQCFKTCSEQNGYVLTLSNAQPVLQYGNPYASQETRDGADGAFYPDEIQRPPVRVPSWGLEDNVVCSQPARNFSRPDGLEDSEDSKEDENVPTAPDPPSQHLRGHGTGFCFDSSFDVHKKCPLCELMFPPNYDQSKFEEHVESHWKVCPMCSEQFPPDYDQQVFERHVQTHFDQNVLNFD

SEQ ID NO: 173 - protein, 1584 aa, Homo sapiens
MSLTSWFLVSSGGTRHRLPREMIFVGRDDCELMLQSRSVDKQHAVINYDASTDEHLVKDLGSLNGTFVNDVRIPEQTYITLKLEDKLRFGYDTNLFTVVQGEMRVPEEALKHEKFTIQLQLSQKSSESELSKSASAKSIDSKVADAATEVQHKTTEALKSEEKAMDISAMPRGTPLYGQPSWWGDDEVDEKRAFKTNGKPEEKNHEAGTSGCSIDAKQVEEQSAAANEEVLFPFCREPSYFEIPTKEFQQPSQITESTIHEIPTKDTPSSHITGAGHASFTIEFDDSTPGKVTIRDHVTKFTSDQRHKSKKSSPGTQDLLGIQTGMMAPENKVADWLAQNNPPQMLWERTEEDSKSIKSDVPVYLKRLKGNKHDDGTQSDSENAGAHRRCSKRATLEEHLRRHHSEHKKLQKVQATEKHQDQAVTSSAHHRGGHGVPHGKLLKQKSEEPSVSIPFLQTALLRSSGSLGHRPSQEMDKMLKNQATSATSEKDNDDDQSDKGTYTIELENPNSEEVEARKMIDKVFGVDDNQDYNRPVINEKHKDLIKDWALSSAAAVMEERKPLTTSGFHHSEEGTSSSGSKRWVSQWASLAANHTRHDQEERIMEFSAPLPLENETEISESGMTVRSTGSATSLASQGERRRRTLPQLPNEEKSLESHRAKVVTQRSEIGEKQDTELQEKETPTQVYQKDKQDADRPLSKMNRAVNGETLKTGGDNKTLLHLGSSAPGKEKSETDKETSLVKQTLAKLQQQEQREEAQWTPTKLSSKNVSGQTDKCREETFKQESQPPEKNSGHSTSKGDRVAQSESKRRKAEEILKSQTPKGGDKKESSKSLVRQGSFTIEKPSPNIPIELIPHINKQTSSTPSSLALTSASRIRERSESLDPDSSMDTTLILKDTEAVMAFLEAKLREDNKTDEGPDTPSYNRDNSISPESDVDTASTISLVTGETERKSTQKRKSFTSLYKDRCSTGSPSKDVTKSSSSGAREKMEKKTKSRSTDVGSRADGRKFVQSSGRIRQPSVDLTDDDQTSSVPHSAISDIMSSDQETYSCKPHGRTPLTSADEHVHSKLEGSKVTKSKTSPVVSGSSSKSTTLPRPRPTRTSLLRRARLGEASDSELADADKASVASEVSTTSSTSKPPTGRRNISRIDLLAQPRRTRLGSLSARSDSEATISRSSASSRTAEAIIRSGARLVPSDKFSPRIRANSISRLSDSKVKSMTSAHGSASVNSRWRRFPTDYASTSEDEFGSNRNSPKHTRLRTSPALKTTRLQSAGSAMPTSSSFKHRIKEQEDYIRDWTAHREEIARISQDLALIAREINDVAGEIDSVTSSGTAPSTTVSTAATTPGSAIDTREELVDRVFDESLNFRKIPPLVHSKTPEGNNGRSGDPRPQAAEPPDHLTITRRRTWSRDEVMGDNLLLSSVFQFSKKIRQSIDKTAGKIRILFKDKDRNWDDIESKLRAESEVPIVKTSSMEISSILQELKRVEKQLQAINAMIDPDGTLEALNNMGFPSAMLPSPPKQKSSPVNNHHSPGQTPTLGQPEARALHPAAVSAAAEFENAESEADFSIHFNRFNPDGEEEDVTVQE

SEQ ID NO: 174 - protein, 249 aa, Homo sapiens
MKLNISFPATGCQKLIEVDDERKLRTFYEKRMATEVAADALGEEWKGYVVRISGGNDKQGFPMKQGVLTHGRVRLLLSKGHSCYRPRRTGERKRKSVRGCIVDANLSVLNLVIVKKGEKDIPGLTDTTVPRRLGPKRASRIRKLFNLSKEDDVRQYVVRKPLNKEGKKPRTKAPKIQRLVTPRVLQHKRRRIALKKQRTKKNKEEAAEYAKLLAKRMKEAKEKRQEQIAKRRRLSSLRASTSKSESSQK

SEQ ID NO: 175 - protein, 206 aa, Homo sapiens
MAAAVLGQLGALWIHNLRSRGKLALGVLPQSYIHTSASLDISRKWEKKNKIVYPPQLPGEPRRPAEIYHCRRQIKYSKDKMWYLAKLIRGMSIDQALAQLEFNDKKGAKIIKEVLLEAQDMAVRDHNVEFRSNLYIAESTSGRGQCLKRIRYHGRGRFGIMEKVYCHYFVKLVEGPPPPPEPPKTAVAHAKEYIQQLRSRTIVHTL

SEQ ID NO: 176 - protein, 1972 aa, Homo sapiens
MGQTKSTSSGGGNRKCNQEQSKNQPLDARVDKIKDKKPRKKAMESSSNSDSDSGTSSDTSSEGISSSDSDDLEEDEEEEDQSIEESEDDDSDSESEAQHKSNNQVLLHGISDPKADGQKATEKAQEKRIHQPLPLAFESQTHSFQSQQKQPQVLSQQLPFIFQSSQAKEESVNKHTSVIQSTGLVSNVKPLSLVNQAKKETYMKLIVPSPDVLKAGNKNTSEESSLLTSELRSKREQYKQAFPSQLKKQESSKSLKKVIAALSNPKATSSSPAHPKQTLENNHPNPFLTNALLGNHQPNGVIQSVIQEAPLALTTKTKMQSKINENIAAASSTPFSSPVNLSTSGRRTPGNQTPVMPSASPILHSQGKEKAVSNNVNPVKTQHHSHPAKSLVEQFRGTDSDIPSSKDSEDSNEDEEEDDEEEDEEDDEDDESDDSQSESDSNSESDTEGSEEEDDDDKDQDESDSDTEGEKTSMKLNKTTSSVKSPSMSLTGHSTPRNLHIAKAPGSAPAALCSESQSPAFLGTSSSTLTSSPHSGTSKRRRVTDERELRIPLEYGWQRETRIRNFGGRLQGEVAYYAPCGKKLRQYPEVIKYLSRNGIMDISRDNFSFSAKIRVGDFYEARDGPQEMQWCLLKEEDVIPRIRAMEGRRGRPPNPDRQRAREESRMRRRKGRPPNVGNAEFLDNADAKLLRKLQAQEIARQAAQIKLLRKLQKQEQARVAKEAKKQQAIMAAEEKRKQKEQIKIMKQQEKIKRIQQIRMEKELRAQQILEAKKKKKEEAANAKLLEAEKRIKEKEMRRQQAVLLKHQERERRRQHMMLMKAMEARKKAEEKERLKQEKRDEKRLNKERKLEQRRLELEMAKELKKPNEDMCLADQKPLPELPRIPGLVLSGSTFSDCLMVVQFLRNFGKVLGFDVNIDVPNLSVLQEGLLNIGDSMGEVQDLLVRLLSAAVCDPGLITGYKAKTALGEHLLNVGVNRDNVSEILQIFMEAHCGQTELTESLKTKAFQAHTPAQKASVLAFLINELACSKSVVSEIDKNIDYMSNLRRDKWVVEGKLRKLRIIHAKKTGKRDTSGGIDLGEEQHPLGTPTPGRKRRRKGGDSDYDDDDDDDSDDQGDEDDEDEEDKEDQKGKKTDICEDEDEGDQAASVEELEKQIEKLSKQQSQYRRKLFDASHSLRSVMFGPDRYRRRYWILPRCGGIFVEGMESGEGLEEIAKEREKLKKAESVQIKEEMFETSGDSLNCSNTDHCEQKEDLKEKDNTNLFLQKPGSFSKLSKLLEVAKMPPESEVMTPKPNAGANGCTLSYQNSGKHSLGSVQSTATQSNVEKADSNNLFNTGSSGPGKFYSPLPNDQLLKTLTEKNRQWFSLLPRTPCDDTSLTHADMSTASLVTPQSQPPSKSPSPTPAPLGSSAQNPVGLNPFALSPLQVKGGVSMMGLQFCGWPTGVVTSNIPFTLSVPSLGSGLGLSEGNGNSFLTSNVASSKSESPVPQNEKATSAQPAAVEVAKPVDFPSPKPIPEEMQFGWWRIIDPEDLKALLKVLHLRGIREKALQKQIQKHLDYITQACLKNKDVAIIELNENEENQVTRDIVENWSVEEQAMEMDLSVLQQVEDLERRVASASLQVKGWMCPEPASEREDLVYFEHKSFTKLCKEHDGEFTGEDESSAHALERKSDNPLDIAVTRLADLERNIERRIEEDIAPGLRVWRRALSEARSAAQVALCIQQLQKSIAWEKSIMKVYCQICRKGDNEELLLLCDGCDKGCHTYCHRPKITTIPDGDWFCPACIAKASGQTLKIKKLHVKGKKTNESKKGKKVTLTGDTEDEDSASTSSSLKRGNKDLQKRKMEENTSINLSKQESFTSVKKPKRDDSKDLALCSMILTEMETHEDAWPFLLPVNLKLVPGYKKVIKKPMDFSTIREKLSSGQYPNLETFALDVRLVFDNCETFNEDDSDIGRAGHNMRKYFEKKWTDTFKVS

SEQ ID NO: 177 - protein, 237 aa, Homo sapiens
MNIFDRKINFDALLKFSHITPSTQQHLKKVYASFALCMFVAAAGAYVHMVTHFIQAGLLSALGSLILMIWLMATPHSHETEQKRLGLLAGFAFLTGVGLGPALEFCIAVNPSILPTAFMGTAMIFTCFTLSALYARRRSYLFLGGILMSALSLLLLSSLGNVFFGSIWPFQANLYVGLVVMCGFVLVDTQLIIEKAEHGDQDYIWHCIDLFLDFITVFRKLMMILAMNEKDKKKEKK

SEQ ID NO: 178 - protein, 473 aa, Homo sapiens
MGAVLGVFSLASWVPCLCSGASCLLCSCCPNSKNSTVTRLIYAFILLLSTVVSYIMQRKEMETYLKKIPGFCEGGFKIHEADINADKDCDVLVGYKAVYRISFAMAIFFFVFSLLMFKVKTSKDLRAAVHNGFWFFKIAALIGIMVGSFYIPGGYFSSVWFVVGMIGAALFILIQLVLLVDFAHSWNESWVNRMEEGNPRLWYAALLSFTSAFYILSIICVGLLYTYYTKPDGCTENKFFISINLILCVVASIISIHPKIQEHQPRSGLLQSSLITLYTMYLTWSAMSNEPDRSCNPNLMSFITRITAPTLAPGNSTAVVPTPTPPSKSGSLLDSDNFIGLFVFVLCLLYSSIRTSTNSQVDKLTLSGSDSVILGDTTTSGASDEEDGQPRRAVDNEKEGVQYSYSLFHLMLCLASLYIMMTLTSWYSPDAKFQSMTSKWPAVWVKISSSWVCLLLYVWTLVAPLVLTSRDFS

SEQ ID NO: 179 - protein, 270 aa, Homo sapiens
MWNSGFESYGSSSYGGAGGYTQSPGGFGSPAPSQAEKKSRARAQHIVPCTISQLLSATLVDEVFRIGNVEISQVTIVGIIRHAEKAPTNIVYKIDDMTAAPMDVRQWVDTDDTSSENTVVPPETYVKVAGHLRSFQNKKSLVAFKIMPLEDMNEFTTHILEVINAHMVLSKANSQPSAGRAPISNPGMSEAGNFGGNSFMPANGLTVAQNQVLNLIKACPRPEGLNFQDLKNQLKHMSVSSIKQAVDFLSNEGHIYSTVDDDHFKSTDAE

SEQ ID NO: 180 - protein, 633 aa, Homo sapiens
MNPSAPSYPMASLYVGDLHPDVTEAMLYEKFSPAGPILSIRVCRDMITRRSLGYAYVNFQQPADAERALDTMNFDVIKGKPVRIMWSQRDPSLRKSGVGNIFIKNLDKSIDNKALYDTFSAFGNILSCKVVCDENGSKGYGFVHFETQEAAERAIEKMNGMLLNDRKVFVGRFKSRKEREAELGARAKEFTNVYIKNFGEDMDDERLKDLFGPALSVKVMTDESGKSKGFGFVSFERHEDAQKAVDEMNGKELNGKQIYVGRAQKKVERQTELKRKFEQMKQDRITRYQGVNLYVKNLDDGIDDERLRKEFSPFGTITSAKVMMEGGRSKGFGFVCFSSPEEATKAVTEMNGRIVATKPLYVALAQRKEERQAHLTNQYMQRMASVRAVPNPVINPYQPAPPSGYFMAAIPQTQNRAAYYPPSQVAQLRPSPRWTAQGARPHPFQNMPGAIRPAAPRPPFSTMRPASSQVPRVMSTQRVANTSTQTMGPRPAAAAAAATPAVRTVPQYKYAAGVRNPQQHLNAQPQVTMQQPAVHVQGQEPLTASMLASAPPQEQKQMLGERLFPLIQAMHPTLAGKITGMLLEIDNSELLHMLESPESLRSKVDEAVAVLQAHQAKEAAQKAVNSATGVPTV

SEQ ID NO: 181 - protein, 151 aa, Homo sapiens [sequence omitted]

SEQ ID NO: 182 - protein, 556 aa, Homo sapiens
MEGPLSVFGDRSTGETIRSQNVMAAASIANIVKSSLGPVGLDKMLVDDIGDVTITNDGATILKLLEVEHPAAKVLCELADLQDKEVGDGTTSVVIIAAELLKNADELVKQKIHPTSVISGYRLACKEAVRYINENLIVNTDELGRDCLINAAKTSMSSKIIGINGDFFANMVVDAVLAIKYTDIRGQPRYPVNSVNILKAHGRSQMESMLISGYALNCVVGSQGMPKRIVNAKIACLDFSLQKTKMKLGVQVVITDPEKLDQIRQRESDITKERIQKILATGANVILTTGGIDDMCLKYFVEAGAMAVRRVLKRDLKRIAKASGATILSTLANLEGEETFEAAMLGQAEEVVQERICDDELILIKNTKARTSASIILRGANDFMCDEMERSLHDALCVVKRVLESKSVVPGGGAVEAALSIYLENYATSMGSREQLAIAEFARSLLVIPNTLAVNAAQDSTDLVAKLRAFHNEAQVNPERKNLKWIGLDLSNGKPRDNKQAGVFEPTIVKVKSLKFATEAAITILRIDDLIKLHPEILRIKHGSYEDAVHSGALND

SEQ ID NO: 183 - protein, 156 aa, Homo sapiens
MALEKSLVRLLLLVLILLVLGWVQPSLGKESRAKKFQRQHMDSDSSPSSSSTYCNQMMRRRNMTQGRCKPVNTFVHEPLVDVQNVCFQEKVTCKNGQGNCYKSNSSMHITDCRLTNGSRYPNCAYRTSPKERHIIVACEGSPYVPVHFDASVEDST

SEQ ID NO: 184 - protein, 404 aa, Homo sapiens
MAAVPELLQQQEEDRSKLRSVSVDLNVDPSLQIDIPDALSERDKVKFTVHTKTTLPTFQSPEFSVTRQHEDFVWLHDTLIETTDYAGLIIPPAPTKPDFDGPREKMQKLGEGEGSMTKEEFAKMKQELEAEYLAVFKKTVSSHEVFLQRLSSHPVLSKDRNFHVFLEYDQDLSVRRKNTKEMFGGFFKSVVKSADEVLFTGVKEVDDFFEQEKNFLINYYNRIKDSCVKADKMTRSHKNVADDYIHTAACLHSLALEEPTVIKKYLLKVAELFEKLRKVEGRVSSDEDLKLTELLRYYMLNIEAAKDLLYRRTKALIDYENSNKALDKARLKSKDVKLAEAHQQECCQKFEQLSESAKEELINFKRKRVAAFRKNLIEMSELEIKHARNNVSLLQSCIDLFKNN

SEQ ID NO: 185 - protein, 1978 aa, Homo sapiens
MSRPRFNPRGDFPLQRPRAPNPSGMRPPGPFMRPGSMGLPRFYPAGRARGIPHRFAGHESYQNMGPQRMNVQVTQHRTDPRLTKEKLDFHEAQQKKGKPHGSRWDDEPHISASVAVKQSSVTQVTEQSPKVQSRYTKESASSILASFGLSNEDLEELSRYPDEQLTPENMPLILRDIRMRKMGRRLPNLPSQSRNKETLGSEAVSSNVIDYGHASKYGYTEDPLEVRIYDPEIPTDEVENEFQSQQNISASVPNPNVICNSMFPVEDVFRQMDFPGESSNNRSFFSVESGTKMSGLHISGGQSVLEPIKSVNQSINQTVSQTMSQSLIPPSMNQQPFSSELISSVSQQERIPHEPVINSSNVHVGSRGSKKNYQSQADIPIRSPFGIVKASWLPKFSHADAQKMKRLPTPSMMNDYYAASPRIFPHLCSLCNVECSHLKDWIQHQNTSTHIESCRQLRQQYPDWNPEILPSRRNEGNRKENETPRRRSHSPSPRRSRRSSSSHRFRRSRSPMHYMYRPRSRSPRICHRFISRYRSRSRSRSPYRIRNPFRGSPKCFRSVSPERMSRRSVRSSDRKKALEDVVQRSGHGTEFNKQKHLEAADKGHSPAQKPKTSSGTKPSVKPTSATKSDSNLGGHSIRCKSKNLEDDTLSECKQVSDKAVSLQRKLRKEQSLHYGSVLLITELPEDGCTEEDVRKLFQPFGKVNDVLIVPYRKEAYLEMEFKEAITAIMKYIETTPLTIKGKSVKICVPGKKKAQNKEVKKKTLESKKVSASTLKRDADASKAVEIVTSTSAAKTGQAKASVAKVNKSTGKSASSVKSVVTVAVKGNKASIKTAKSGGKKSLEAKKTGNVKNKDSNKPVTIPENSEIKTSIEVKATENCAKEAISDAALEATENEPLNKETEEMCVMLVSNLPNKGYSVEEVYDLAKPFGGLKDILILSSHKKAYIEINRKAAESMVKFYTCFPVLMDGNQLSISMAPENMNIKDEEAIFITLVKENDPEANIDTIYDRFVHLDNLPEDGLQCVLCVGLQFGKVDHHVFISNRNKAILQLDSPESAQSMYSFLKQNPQNIGDHMLTCSLSPKIDLPEVQIEHDPELEKESPGLKNSPIDESEVQTATDSPSVKPNELEEESTPSIQTETLVQQEEPCEEEAEKATCDSDFAVETLELETQGEEVKEEIPLVASASVSIEQFTENAEECALNQQMFNSDLEKKGAEIINPKTALLPSDSVFAEERNLKGILEESPSEAEDFISGITQTMVEAVAEVEKNETVSEILPSTCIVTLVPGIPTGDEKTVDKKNISEKKGNMDEKEEKEFNTKETRMDLQIGTEKAEKNEGRMDAEKVEKMAAMKEKPAENTLFKAYPNKGVGQANKPDETSKTSILAVSDVSSSKPSIKAVIVSSPKAKATVSKTENQKSFPKSVPRDQINAEKKLSAKEFGLLKPTSARSGLAESSSKFKPTQSSLTRGGSGRISALQGKLSKLDYRDITKQSQETEARPSIMKRDDSNNKTLAEQNTKNPKSTTGRSSKSKEEPLFPFNLDEFVTVDEVIEEVNPSQAKQNPLKGKRKETLKNVPFSELNLKKKKGKTSTPRGVEGELSFVTLDEIGEEEDAAAHLAQALVTVDEVIDEEELNMEEMVKNSNSLFTLDELIDQDDCISHSEPKDVTVLSVAEEQDLLKQERLVTVDEIGEVEELPLNESADITFATLNTKGNEGDTVRDSIGFISSQVPEDPSTLVTVDEIQDDSSDLHLVTLDEVTEEDEDSLADFNNLKEELNFVTVDEVGEEEDGDNDLKVELAQSKNDHPTDKKGNRKKRAVDTKKTKLESLSQVGPVNENVMEEDLKTMIERHLTAKTPTKRVRIGKTLPSEKAVVTEPAKGEEAFQMSEVDEESGLKDSEPERKRKKTEDSSSGKSVASDVPEELDFLVPKAGFFCPICSLFYSGEKAMTNHCKSTRHKQNTEKFMAKQRKEKEQNEAEERSSR

SEQ ID NO: 186 - protein, 813 aa, Homo sapiens
MSKRHRLDLGEDYPSGKKRAGTDGKDRDRDRDREDRSKDRDRERDRGDREREREKEKEKELRASTNAMLISAGLPPLKASHSAHSTHSAHSTHSTHSAHSTHAGHAGHTSLPQCINPFTNLPHTPRYYDILKKRLQLPVWEYKDRFTDILGRHQSFVLVGETGSGKTTQIPHRCVEYMRSLPGPKRGVACTQPRRVAAMSVAQRVADEMDVMLGQEVGYSIRFEDCSSAKTFFMYMTDGMLLREAMNDPLLERYGVIILDEAHERTLATDILMGVLKEVVRQRSDLKVIVMSATLDAGKFQIYFDNCPLLTIPGRTHPVEIFYTPEPERDYLEAAIRTVIQIHMCEEEEGDLLLFLTGQEEIDEACKRIKREVDDLGPEVGDIKIIPLYSTLPPQQQQRIFEPPPPKKQNGAIGRKVVVSTNIAETSLTIDGVVFVIDPGFAKQKVYNPRIRVESLLVTAISKASAQQRAGRAGRTRPGKCFRLYTEKAYKTEMQDNTYPEILRSNLGSVVLQLKKLGIDDLVHFDFMDPPAPETLMRALELLNYLAALNDDGDLTELGSMMAEFPLDPQLAKMVIASCDYNCSNEVLSITAMLSVPQCFVRPTEAKKAADEAKMRFAHIDGDHLTLLNVYHAFKQNHESVQWCYDNFINYRSLMSADNVRQQLSRIMDRFNLPRRSTDFTSRDYYINIRKALVTGYFMQVAHLERTGHYLTVKDNQVVQLHPSTVLDHKPEWVLYNEFVLTTKNYIRTCTDIKPEWLVKIAPQYYDMSNFPQCEAKRQLDRIIAQTSIQGIFTVLNSVLRTEVIERTALKDE

SEQ ID NO: 187 - protein, 137 aa, Homo sapiens [sequence omitted]

SEQ ID NO: 188 - protein, 154 aa, Homo sapiens [sequence omitted]

SEQ ID NO: 189 - protein, 378 aa, Homo sapiens [sequence omitted]

SEQ ID NO: 190 - protein, 160 aa, Homo sapiens
MAAERKTKLSKNLLRMKFMQRGLDSETKKQLEEEEKKIISEEHWYLDLPELKEKESFIIEEQSFLLCEDLLYGRMSFRGFNPEVEKLMLQMNAKHKAEEVEDETVELDVSDEEMARRYETLVGTIGKKFARKRDHANYEEDENGDITPIKAKKMFLKPQD

SEQ ID NO: 191 - protein, 361 aa, Homo sapiens
MYGKGKSNSSAVPSDSQAREKLALYVYEYLLHVGAQKSAQTFLSEIRWEKNITLGEPPGFLHSWWCVFWDLYCAAPERRETCEHSSEAKAFHDYSAAAAPSPVLGNIPPGDGMPVGPVPPGFFQPFMSPRYPGGPRPPLRIPNQALGGVPGSQPLLPRGMDPTRQQGHPNMGGPMQRMTPPRGMVPLGPQNYGGAMRPPLNALGGPGMPGMNMGPGGGRPWPNPTNANSIPYSSASPGNYVGPPGGGGPPGTPIMPSPADSTNSGDNMYTLMNAVPPGPNRPNFPMGPGSDGPMGGLGGMESHHMNGSLGSGDMDSISKNSPNNMSLSNQPGTPRDDGEMGGNFLNPFQSESYSPSMTMSV

SEQ ID NO: 192 - protein, 318 aa, Homo sapiens
MPMANLLLLIVPILIAMAFLMLTERKILGYMQLRKGPNVVGPYGLLQPFADAMKLFTKEPLKPATSTITLYITAPTLALTIALLLWTPLPMPNPLVNLNLGLLFILATSSLAVYSILWSGWASNSNYALIGALRAVAQTISYEVTLAIILLSTLLMSGSFNLSTLITTQEHLWLLLPSWPLAMMWFISTLAETNRTPFDLAEGESELVSGFNIEYAAGPFALFFMAEYTNIIMMNTLTTTIFLGTTYDALSPELYTTYFVTKTLLLTSLFLWIRTAYPRFRYDQLMHLLWKNFLPLTLALLMWYVSMPITISSIPPQT

SEQ ID NO: 193 - protein, 2039 aa, Homo sapiens
MDIVDTFNHLIPTEHLDDALFLGSNLENEVCEDFSASQNVLEDSLKNMLSDKDPMLGSASNQFCLPVLDSNDPNFQMPCSTVVGLDDIMDEGVVKESGNDTIDEEELILPNRNLRDKVEENSVRSPRKSPRLMAQEQVRSLRQSTIAKRSNAAPLSNTKKASGKTVSTAKAGVKQPERSQVKEEVCMSLKPEYHKENRRCSRNSGQIEVVPEVSVSSSHSSVSSCLEMKDEDGLDSKHKCNNPGEIDVPSHELNCSLLSETCVTIGEKKNEALMECKAKPVGSPLFKFSDKEEHEQNDSISGKTGETVVEEMIATRKVEQDSKETVKLSHEDDHILEDAGSSDISSDAACTNPNKTENSLVGLPSCVDEVTECNLELKDTMGIADKTENTLERNKIEPLGYCEDAESNRQLESTEFNKSNLEVVDTSTFGPESNILENAICDVPDQNSKQLNAIESTKIESHETANLQDDRNSQSSSVSYLESKSVKSKHTKPVIHSKQNMTTDAPKKIVAAKYEVIHSKTKVNVKSVKRNTDVPESQQNFHRPVKVRKKQIDKEPKIQSCNSGVKSVKNQAHSVLKKTLQDQTLVQIFKPLTHSLSDKSHAHPGCLKEPHHPAQTGHVSHSSQKQCHKPQQQAPAMKTNSHVKEELEHPGVEHFKEEDKLKLKKPEKNLQPRQRRSSKSFSLDEPPLFIPDNIATIRREGSDHSSSFESKYMWTPSKQCGFCKKPHGNRFMVGCGRCDDWFHGDCVGLSLSQAQQMGEEDKEYVCVKCCAEEDKKTEILDPDTLENQATVEFHSGDKTMECEKLGLSKHTTNDRTKYIDDTVKHKVKILKRESGEGRNSSDCRDNEIKKWQLAPLRKMGQPVLPRRSSEEKSEKIPKESTTVTCTGEKASKPGTHEKQEMKKKKVEKGVLNVHPAASASKPSADQIRQSVRHSLKDILMKRLTDSNLKVPEEKAAKVATKIEKELFSFFRDTDAKYKNKYRSLMFNLKDPKNNILFKKVLKGEVTPDHLIRMSPEELASKELAAWRRRENRHTIEMIEKEQREVERRPITKITHKGEIEIESDAPMKEQEAAMEIQEPAANKSLEKPEGSEKQKEEVDSMSKDTTSQHRQHLFDLNCKICIGRMAPPVDDLSPKKVKVVVGVARKHSDNEAESIADALSSTSNILASEFFEEEKQESPKSTFSPAPRPEMPGTVEVESTFLARLNFIWKGFINMPSVAKFVTKAYPVSGSPEYLTEDLPDSIQVGGRISPQTVWDYVEKIKASGTKEICVVRFTPVTEEDQISYTLLFAYFSSRKRYGVAANNMKQVKDMYLIPLGATDKIPHPLVPFDGPGLELHRPNLLLGLIIRQKLKRQHSACASTSHIAETPESAPPIALPPDKKSKIEVSTEEAPEEENDFFNSFTTVLHKQRNKPQQNLQEDLPTAVEPLMEVTKQEPPKPLRFLPGVLIGWENQPTTLELANKPLPVDDILQSLLGTTGQVYDQAQSVMEQNTVKEIPFLNEQTNSKIEKTDNVEVTDGENKEIKVKVDNISESTDKSAEIETSVVGSSSISAGSLTSLSLRGKPPDVSTEAFLTNLSIQSKQEETVESKEKTLKRQLQEDQENNLQDNQTSNSSPCRSNVGKGNIDGNVSCSENLVANTARSPQFINLKRDPRQAAGRSQPVTTSESKDGDSCRNGEKHMLPGLSHNKEHLTEQINVEEKLCSAEKNSCVQQSDNLKVAQNSPSVENIQTSQAEQAKPLQEDILMQNIETVHPFRRGSAVATSHFEVGNTCPSEFPSKSITFTSRSTSPRTSTNFSPMRPQQPNLQHLKSSPPGFPFPGPPNFPPQSMFGFPPHLPPPLLPPPGFGFAQNPMVPWPPVVHLPGQPQRMMGPLSQASRYIGPQNFYQVKDIRRPERRHSDPWGRQDQQQLDRPFNRGKGDRQRFYSDSHHLKRERHEKEWEQESERHRRRDRSQDKDRDRKSREEGHKDKERARLSHGDRGTDGKASRDSRNVDKKPDKPKSEDYEKDKEREKSKHREGEKDRDRYHKDRDHTDRTKSKR

SEQ ID NO: 194 - protein, 284 aa, Homo sapiens
MAGCAARAPPGSEARLSLATFLLGASVLALPLLTRAGLQGRTGLALYVAGLNALLLLLYRPPRYQIAIRACFLGFVFGCGTLLSFSQSSWSHFGWYMCSLSLFHYSEYLVTAVNNPKSLSLDSFLLNHSLEYTVAALSSWLEFTLENIFWPELKQITWLSVTGLLMVVFGECLRKAAMFTAGSNFNHVVQNEKSDTHTLVTSGVYAWFRHPSYVGWFYWSIGTQVMLCNPICGVSYALTVWRFFRDRTEEEEISLIHFFGEEYLEYKKRVPTGLPFIKGVKVDL

SEQ ID NO: 195 - protein, 1938 aa, Homo sapiens
MVEYGKYSNDLYELQASRWEWKRLKAKTPKNGPPPCPRLGHSFSLVGNKCYLFGGLANDSEDPKNNIPRYLNDLYILELRPGSGVVAWDIPITYGVLPPPRESHTAVVYTEKDNKKSKLVIYGGMSGCRLGDLWTLDIDTLTWNKPSLSGVAPLPRSLHSATTIGNKMYVFGGWVPLVMDDVKVATHEKEWKCTNTLACLNLDTMAWETILMDTLEDNIPRARAGHCAVAINTRLYIWSGRDGYRKAWNNQVCCKDLWYLETEKPPPPARVQLVRANTNSLEVSWGAVATADSYLLQLQKYDIPATAATATSPTPNPVPSVPANPPKSPAPAAAAPAVQPLTQVGITLLPQAAPAPPTTTTIQVLPTVPGSSISVPTAARTQGVPAVLKVTGPQATTGTPLVTMRPASQAGKAPVTVTSLPAGVRMVVPTQSAQGTVIGSSPQMSGMAALAAAAAATQKIPPSSRPTVLSVPAGTTIVKTMAVTPGTTTLPATVKVASSPVMVSVSNPATRMLKTAAAQVGTSVSSATNTSTRPIITVHKSGTVTVAQQAQVVTTVVGGVTKTITLVKSPISVPGGSALISNLGKVMSVVQTKPVQTSAVTGQASTGPVTQIIQTKGPLPAGTILKLVTSADGKPTTIITTTQASGAGTKPTILGISSVSPSTTKPGTTTIIKTIPMSAIITQAGATGVTSSPGIKSPITIITTKVMTSGTGAPAKIITAVPKIATGHGQQGVTQVVLKGAPGQPGTILRTVPMGGVRLVTPVTVSAVKPAVTTLVVKGTTGVTTLGTVTGTVSTSLAGAGGHSTSASLATPITTLGTIATLSSQVINPTAITVSAAQTTLTAAGGLTTPTITMQPVSQPTQVTLITAPSGVEAQPVHDLPVSILASPTTEQPTATVTIADSGQGDVQPGTVTLVCSNPPCETHETGTTNTATTTVVANLGGHPQPTQVQFVCDRQEAAASLVTSTVGQQNGSVVRVCSNPPCETHETGTTNTATTATSNMAGQHGCSNPPCETHETGTTNTATTAMSSVGANHQRDARRACAAGTPAVIRISVATGALEAAQGSKPQCQTRQTSATSTTMTVMATGAPCSAGPLLGPSMAREPGGRSPAFVQLAPLSSKVRLSSPSIKDLPAGRHSHAVSTAAMTRSSVGAGEPRMAPVCESLQGGSPSTTVTVTALEALLCPSATVTQVCSNPPCETHETGTTNTATTSNAGSAQRVCSNPPCETHETGTTHTATTATSNGGTGQPEGGQQPPAGRPCETHQTTSTGTTMSVSVGALLPDATSSHRTVESGLEVAAAPSVTPQAGTALLAPFPTQRVCSNPPCETHETGTTHTATTVTSNMSSNQDPPPAASDQGEVESTQGDSVNITSSSAITTTVSSTLTRAVTTVTQSTPVPGPSVPPPEELQVSPGPRQQLPPRQLLQSASTALMGESAEVLSASQTPELPAAVDLSSTGEPSSGQESAGSAVVATVVVQPPPPTQSEVDQLSLPQELMAEAQAGTTTLMVTGLTPEELAVTAAAEAAAQAAATEEAQALAIQAVLQAAQQAVMGTGEPMDTSEAAATVTQAELGHLSAEGQEGQATTIPIVLTQQELAALVQQQQLQEAQAQQQHHHLPTEALAPADSLNDPAIESNCLNELAGTVPSTVALLPSTATESLAPSNTFVAPQPVVVASPAKLQAAATLTEVANGIESLGVKPDLPPPPSKAPMKKENQWFDVGVIKGTNVMVTHYFLPPDDAVPSDDDLGTVPDYNQLKKQELQPGTAYKFRVAGINACARGPFSEISAFKTCLPGFPGAPCAIKISKSPDGAHLTWEPPSVTSGKIIEYSVYLAIQSSQAGGELKSSTPAQLAFMRVYCGPSPSCLVQSSSLSNAHIDYTTKPAIIFRIAARNEKGYGPATQVRWLQETSKDSSGTKPANKRPMSSPEMKSAPKKSKADGQ

SEQ ID NO: 196 - protein, 341 aa, Homo sapiens
MVGEMETKEKPKPTPDYLMQLMNDKKLMSSLPNFCGIFNHLERLLDEEISRVRKDMYNDTLNGSTEKRSAELPDAVGPIVQLQEKLYVPVKEYPDFNFVGRILGPRGLTAKQLEAETGCKIMVRGKGSMRDKKKEEQNRGKPNWEHLNEDLHVLITVEDAQNRAEIKLKRAVEEVKKLLVPAAEGEDSLKKMQLMELAILNGTYRDANIKSPALAFSLAATAQAAPRIITGPAPVLPPAALRTPTPAGPTIMPLIRQIQTAVMPNGTPHPTAAIVPPGPEAGLIYTPYEYPYTLAPATSILEYPIEPSGVLGAVATKVRRHDMRVHPYQRIVTADRAATGN

SEQ ID NO: 197 - protein, 98 aa, Homo sapiens
MAAEPLTELEESIETVVTTFFTFARQEGRKDSLSVNEFKELVTQQLPHLLKDVGSLDEKMKSLDVNQDSELKFNEYWRLIGELAKEIRKKKDLKIRKK

SEQ ID NO: 198 - protein, 244 aa, Homo sapiens
MFRRKLTALDYHNPAGFNCKDETEFRNFIVWLEDQKIRHYKIEDRGNLRNIHSSDWPKFFEKYLRDVNCPFKIQDRQEAIDWLLGLAVRLEYGDNAEKYKDLVPDNSKTADNATKNAEPLINLDVNNPDFKAGVMALANLLQIQRHDDYLVMLKAIRILVQERLTQDAVAKANQTKEGLPVALDKHILGFDTGDAVLNEAAQILRLLHIEELRELQTKINEAIVAVQAIIADPKTDHRLGKVGR

SEQ ID NO: 199 - protein, 746 aa, Homo sapiens
MQAKKRYFILLSAGSCLALLFYFGGLQFRASRSHSRREEHSGRNGLHHPSPDHFWPRFPEPLRPFVPWDQLENEDSSVHISPRQKRDANSSIYKGKKCRMESCFDFTLCKKNGFKVYVYPQQKGEKIAESYQNILAAIEGSRFYTSDPSQACLFVLSLDTLDRDQLSPQYVHNLRSKVQSLHLWNNGRNHLIFNLYSGTWPDYTEDVGFDIGQAMLAKASISTENFRPNFDVSIPLFSKDHPRTGGERGFLKFNTIPPLRKYMLVFKGKRYLTGIGSDTRNALYHVHNGEDVVLLTTCKHGKDWQKHKDSRCDRDNTEYEKYDYREMLHNATFCLVPRGRRLGSFRFLEALQAACVPVMLSNGWELPFSEVINWNQAAVIGDERLLLQIPSTIRSIHQDKILALRQQTQFLWEAYFSSVEKIVLTTLEIIQDRIFKHISRNSLIWNKHPGGLFVLPQYSSYLGDFPYYYANLGLKPPSKFTAVIHAVTPLVSQSQPVLKLLVAAAKSQYCAQIIVLWNCDKPLPAKHRWPATAVPVVVIEGESKVMSSRFLPYDNIITDAVLSLDEDTVLSTTEVDFAFTVWQSFPERIVGYPARSHFWDNSKERWGYTSKWTNDYSMVLTGAAIYHKYYHYLYSHYLPASLKNMVDQLANCEDILMNFLVSAVTKLPPIKVTQKKQYKETMMGQTSRASRWADPDHFAQRQSCMNTFASWFGYMPLIHSQMRLDPVLFKDQVSILRKKYRDIERL

SEQ ID NO: 200 - protein, 529 aa, Homo sapiens [sequence omitted]

SEQ ID NO: 201 - protein, 194 aa, Homo sapiens [sequence omitted]

SEQ ID NO: 202 - protein, 156 aa, Homo sapiens
MSGGLLKALRSDSYVELSQYRDQHFRGDNEEQEKLLKKSCTLYVGNLSFYTTEEQIYELFSKSGDIKKIIMGLDKMKKTACGFCFVEYYSRADAENAMRYINGTRLDDRIIRTDWDAGFKEGRQYGRGRSGGQVRDEYRQDYDAGRGGYGKLAQNQ

SEQ ID NO: 203 - protein, 226 aa, Homo sapiens [sequence omitted]

SEQ ID NO: 204 - protein, 858 aa, Homo sapiens
MSVVGLDVGSQSCYIAVARAGGIETIANEFSDRCTPSVISFGSKNRTIGVAAKNQQITHANNTVSNFKRFHGRAFNDPFIQKEKENLSYDLVPLKNGGVGIKVMYMGEEHLFSVEQITAMLLTKLKETAENSLKKPVTDCVISVPSFFTDAERRSVLDAAQIVGLNCLRLMNDMTAVALNYGIYKQDLPSLDEKPRIVVFVDMGHSAFQVSACAFNKGKLKVLGTAFDPFLGGKNFDEKLVEHFCAEFKTKYKLDAKSKIRALLRLYQECEKLKKLMSSNSTDLPLNIECFMNDKDVSGKMNRSQFEELCAELLQKIEVPLYSLLEQTHLKVEDVSAVEIVGGATRIPAVKERIAKFFGKDISTTLNADEAVARGCALQCAILSPAFKVREFSVTDAVPFPISLIWNHDSEDTEGVHEVFSRNHAAPFSKVLTFLRRGPFELEAFYSDPQGVPYPEAKIGRFVVQNVSAQKDGEKSRVKVKVRVNTHGIFTISTASMVEKVPTEENEMSSEADMECLNQRPPENPDTDKNVQQDNSEAGTQPQVQTDAQQTSQSPPSPELTSEENKIPDADKANEKKVDQPPEAKKPKIKVVNVELPIEANLVWQLGKDLLNMYIETEGKMIMQDKLEKERNDAKNAVEEYVYEFRDKLCGPYEKFICEQDHQNFLRLLTETEDWLYEEGEDQAKQAYVDKLEELMKIGTPVKVRFQEAEERPKMFEELGQRLQHYAKIAADFRNKDEKYNHIDESEMKKVEKSVNEVMEWMNNVMNAQAKKSLDQDPVVRAQEIKTKIKELNNTCEPVVTQPKPKIESPKLERTPNGPNIDKKEEDLEDKNNFGAEPPHQNGECYPNEKNSVNMDLD

SEQ ID NO: 205 - protein, 737 aa, Homo sapiens
MPDHDSTALLSRQTKRRRVDIGVKRTVGTASAFFAKARATFFSAMNPQGSEQDVEYSVVQHADGEKSNVLRKLLKRANSYEDAMMPFPGATIISQLLKNNMNKNGGTEPSFQASGLSSTGSEVHQEDICSNSSRDSPPECLSPFGRPTMSQFDMDRLCDEHLRAKRARVENIIRGMSHSPSVALRGNENEREMAPQSVSPRESYRENKRKQKLPQQQQQSFQQLVSARKEQKREERRQLKQQLEDMQKQLRQLQEKFYQIYDSTDSENDEDGNLSEDSMRSEILDARAQDSVGRSDNEMCELDPGQFIDRARALIREQEMAENKPKREGNNKERDHGPNSLQPEGKHLAETLKQELNTAMSQVVDTVVKVFSAKPSRQVPQVFPPLQIPQARFAVNGENHNFHTANQRLQCFGDVIIPNPLDTFGNVQMASSTDQTEALPLVVRKNSSDQSASGPAAGGHHQPLHQSPLSATTGFTTSTFRHPFPLPLMAYPFQSPLGAPSGSFSGKDRASPESLDLTRDTTSLRTKMSSHHLSHHPCSPAHPPSTAEGLSLSLIKSECGDLQDMSEISPYSGSAMQEGLSPNHLKKAKLMFFYTRYPSSNMLKTYFSDVKFNRCITSQLIKWFSNFREFYYIQMEKYARQAINDGVTSTEELSITRDCELYRALNMHYNKANDFEVPERFLEVAQITLREFFNAIIAGKDVDPSWKKAIYKVICKLDSEVPEIFKSPNCLQELLHE

SEQ ID NO: 206 - protein, 375 aa, Homo sapiens
MDDDIAALVVDNGSGMCKAGFAGDDAPRAVFPSIVGRPRHQGVMVGMGQKDSYVGDEAQSKRGILTLKYPIEHGIVTNWDDMEKIWHHTFYNELRVAPEEHPVLLTEAPLNPKANREKMTQIMFETFNTPAMYVAIQAVLSLYASGRTTGIVMDSGDGVTHTVPIYEGYALPHAILRLDLAGRDLTDYLMKILTERGYSFTTTAEREIVRDIKEKLCYVALDFEQEMATAASSSSLEKSYELPDGQVITIGNERFRCPEALFQPSFLGMESCGIHETTFNSIMKCDVDIRKDLYANTVLSGGTTMYPGIADRMQKEITALAPSTMKIKIIAPPERKYSVWIGGSILASLSTFQQMWISKQEYDESGPSIVHRKCF

SEQ ID NO: 207 - protein, 44 aa, Homo sapiens
MSDKPDMAEIEKFDKSKLKKTETQEKNPLPSKETIEQEKQAGES

SEQ ID NO: 208 - protein, 763 aa, Homo sapiens
MAATGTAAAAATGRLLLLLLVGLTAPALALAGYIEALAANAGTGFAVAEPQIAMFCGKLNMHVNIQTGKWEPDPTGTKSCFETKEEVLQYCQEMYPELQITNVMEANQRVSIDNWCRRDKKQCKSRFVTPFKCLVGEFVSDVLLVPEKCQFFHKERMEVCENHQHWHTVVKEACLTQGMTLYSYGMLLPCGVDQFHGTEYVCCPQTKIIGSVSKEEEEEDEEEEEEEDEEEDYDVYKSEFPTEADLEDFTEAAVDEDDEDEEEGEEVVEDRDYYYDTFKGDDYNEENPTEPGSDGTMSDKEITHDVKAVCSQEAMTGPCRAVMPRWYFDLSKGKCVRFIYGGCGGNRNNFESEDYCMAVCKAMIPPTPLPTNDVDVYFETSADDNEHARFQKAKEQLEIRHRNRMDRVKKEWEEAELQAKNLPKAERQTLIQHFQAMVKALEKEAASEKQQLVETHLARVEAMLNDRRRMALENYLAALQSDPPRPHRILQALRRYVRAENKDRLHTIRHYQHVLAVDPEKAAQMKSQVMTHLHVIEERRNQSLSLLYKVPYVAQEIQEEIDELLQEQRADMDQFTASISETPVDVRVSSEESEEIPPFHPFHPFPALPENEDTQPELYHPMKKGSGVGEQDGGLIGAEEKVINSKNKVDENMVIDETLDVKEMIFNAERVGGLEEERESVGPLREDFSLSSSALIGLLVIAVAIATVIVISLVMLRKRQYGTISHGIVEVDPMLTPEERHLNKMQNHGYENPTYKYLEQMQI

SEQ ID NO: 209 - protein, 759 aa, Homo sapiens
MESSPFNRRQWTSLSLRVTAKELSLVNKNKSSAIVEIFSKYQKAAEETNMEKKRSNTENLSQHFRKGTLTVLKKKWENPGLGAESHTDSLRNSSTEIRHRADHPPAEVTSHAASGAKADQEEQIHPRSRLRSPPEALVQGRYPHIKDGEDLKDHSTESKKMENCLGESRHEVEKSEISENTDASGKIEKYNVPLNRLKMMFEKGEPTQTKILRAQSRSASGRKISENSYSLDDLEIGPGQLSSSTFDSEKNESRRNLELPRLSETSIKDRMAKYQAAVSKQSSSTNYTNELKASGGEIKIHKMEQKENVPPGPEVCITHQEGEKISANENSLAVRSTPAEDDSRDSQVKSEVQQPVHPKPLSPDSRASSLSESSPPKAMKKFQAPARETCVECQKTVYPMERLLANQQVFHISCFRCSYCNNKLSLGTYASLHGRIYCKPHFNQLFKSKGNYDEGFGHRPHKDLWASKNENEEILERPAQLANARETPHSPGVEDAPIAKVGVLAASMEAKASSQQEKEDKPAETKKLRIAWPPPTELGSSGSALEEGIKMSKPKWPPEDEISKPEVPEDVDLDLKKLRRSSSLKERSRPFTVAASFQSTSVKSPKTVSPPIRKGWSMSEQSEESVGGRVAERKQVENAKASKKNGNVGKTTWQNKESKGETGKRSKEGHSLEMENENLVENGADSDEDDNSFLKQQSPQEPKSLNWSSFVDNTFAEEFTTQNQKSQDVELWEGEVVKELSVEEQIKRNRYYDEDEDEE

SEQ ID NO: 210 - protein, 873 aa, Homo sapiens
MQDAENVAVPEAAEERAEPGQQQPAAEPPPAEGLLRPAGPGAPEAAGTEASSEEVGIAEAGPEPEVRTEPAAEAEAASGPSESPSPPAAEELPGSHAEPPVPAQGEAPGEQARDAGSDSRAQAVSEDAGGNEGRAAEAEPRALENGDADEPSFSDPEDFVDDVSEEELLGDVLKDRPQEADGIDSVIVVDNVPQVGPDRLEKLKNVIHKIFSKFGKITNDFYPEEDGKTKGYIFLEYASPAHAVDAVKNADGYKLDKQHTFRVNLFTDFDKYMTISDEWDIPEKQPFKDLGNLRYWLEEAECRDQYSVIFESGDRTSIFWNDVKDPVSIEERARWTETYVRWSPKGTYLATFHQRGIALWGGEKFKQIQRFSHQGVQLIDFSPCERYLVTFSPLMDTQDDPQAIIIWDILTGHKKRGFHCESSAHWPIFKWSHDGKFFARMTLDTLSIYETPSMGLLDKKSLKISGIKDFSWSPGGNIIAFWVPEDKDIPARVTLMQLPTRQEIRVRNLFNVVDCKLHWQKNGDYLCVKVDRTPKGTQGVVTNFEIFRMREKQVPVDVVEMKETIIAFAWEPNGSKFAVLHGEAPRISVSFYHVKNNGKIELIKMFDKQQANTIFWSPQGQFVVLAGLRSMNGALAFVDTSDCTVMNIAEHYMASDVEWDPTGRYVVTSVSWWSHKVDNAYWLWTFQGRLLQKNNKDRFCQLLWRPRPPTLLSQEQIKQIKKDLKKYSKIFEQKDRLSQSKASKELVERRRTMMEDFRKYRKMAQELYMEQKNERLELRGGVDTDELDSNVDDWEEETIEFFVTEEIIPLGIRSDLEHCAQPCVLWSRGRPAGSRVTPASSLCSLALDCDCAWILPLRHIFVPFSPWCLQWGI

SEQ ID NO: 211 - protein, 440 aa, Homo sapiens [sequence omitted]

SEQ ID NO: 212 - protein, 103 aa, Homo sapiens
MAESWSGQALQALPATVLGALGSEFLREWEAQDMRVTLFKLLLLWLVLSLLGIQLAWGFYGNTVTGLYHRPGLGGQNGSTPDGSTHFPSWEMAANEPLKTHRE

SEQ ID NO: 213 - protein, 127 aa, Homo sapiens
MGDKPIWEQIGSSFIQHYYQLFDNDRTQLGAIYIDASCLTWEGQQFQGKAAIVEKLSSLPFQKIQHSITAQDHQPTPDSCIISMVVGQLKADEDPIMGFHQMFLLKNINDAWVCTNDMFRLALHNFG

SEQ ID NO: 214 - protein, 172 aa, Homo sapiens
MSSKKAKTKTTKKRPQRATSNVFAMFDQSQIQEFKEAFNMIDQNRDGFIDKEDLHDMLASLGKNPTDAYLDAMMNEAPGPINFTMFLTMFGEKLNGTDPEDVIRNAFACFDEEATGTIQEDYLRELLTTMGDRFTDEEVDELYREAPIDKKGNFNYIEFTRILKHGAKDKDD

SEQ ID NO: 215 - protein, 457 aa, Homo sapiens
MEPWPLLLLFSLCSAGLVLGSEHETRLVAKLFKDYSSVVRPVEDHRQVVEVTVGLQLIQLINVDEVNQIVTTNVRLKQQWVDYNLKWNPDDYGGVKKIHIPSEKIWRPDLVLYNNADGDFAIVKFTKVLLQYTGHITWTPPAIFKSYCEIIVTHFPFDEQNCSMKLGTWTYDGSVVAINPESDQPDLSNFMESGEWVIKESRGWKHSVTYSCCPDTPYLDITYHFVMQRLPLYFIVNVIIPCLLFSFLTGLVFYLPTDSGEKMTLSISVLLSLTVFLLVIVELIPSTSSAVPLIGKYMLFTMVFVIASIIITVIVINTHHRSPSTHVMPNWVRKVFIDTIPNIMFFSTMKRPSREKQDKKIFTEDIDISDISGKPGPPPMGFHSPLIKHPEVKSAIEGIKYIAETMKSDQESNNAAAEWKYVAMVMDHILLGVFMLVCIIGTLAVFAGRLIELNQQG

SEQ ID NO: 216 - protein, 2468 aa, Homo sapiens
MATVVVEATEPEPSGSIANPAASTSPSLSHRFLDSKFYLLVVVGEIVTEEHLRRAIGNIELGIRSWDTNLIECNLDQELKLFVSRHSARFSPEVPGQKILHHRSDVLETVVLINPSDEAVSTEVRLMITDAARHKLLVLTGQCFENTGELILQSGSFSFQNFIEIFTDQEIGELLSTTHPANKASLTLFCPEEGDWKNSNLDRHNLQDFINIKLNSASILPEMEGLSEFTEYLSESVEVPSPFDILEPPTSGGFLKLSKPCCYIFPGGRGDSALFAVNGFNMLINGGSERKSCFWKLIRHLDRVDSILLTHIGDDNLPGINSMLQRKIAELEEEQSQGSTTNSDWMKNLISPDLGVVFLNVPENLKNPEPNIKMKRSIEEACFTLQYLNKLSMKPEPLFRSVGNTIDPVILFQKMGVGKLEMYVLNPVKSSKEMQYFMQQWTGTNKDKAEFILPNGQEVDLPISYLTSVSSLIVWHPANPAEKIIRVLFPGNSTQYNILEGLEKLKHLDFLKQPLATQKDLTGQVPTPVVKQTKLKQRADSRESLKPAAKPLPSKSVRKESKEETPEVTKVNHVEKPPKVESKEKVMVKKDKPVKTETKPSVTEKEVPSKEEPSPVKAEVAEKQATDVKPKAAKEKTVKKETKVKPEDKKEEKEKPKKEVAKKEDKTPIKKEEKPKKEEVKKEVKKEIKKEEKKEPKKEVKKETPPKEVKKEVKKEEKKEVKKEEKEPKKEIKKLPKDAKKSSTPLSEAKKPAALKPKVPKKEESVKKDSVAAGKPKEKGKIKVIKKEGKAAEAVAAAVGTGATTAAVMAAAGIAAIGPAKELEAERSLMSSPEDLTKDFEELKAEEVDVTKDIKPQLELIEDEEKLKETEPVEAYVIQKEREVTKGPAESPDEGITTTEGEGECEQTPEELEPVEKQGVDDIEKFEDEGAGFEESSETGDYEEKAETEEAEEPEEDGEEHVCVSASKHSPTEDEESAKAEADAYIREKRESVASGDDRAEEDMDEAIEKGEAEQSEEEADEEDKAEDAREEEYEPEKMEAEDYVMAVVDKAAEAGGAEEQYGFLTTPTKQLGAQSPGREPASSIHDETLPGGSESEATASDEENREDQPEEFTATSGYTQSTIEISSEPTPMDEMSTPRDVMSDETNNEETESPSQEFVNITKYESSLYSQEYSKPADVTPLNGFSEGSKTDATDGKDYNASASTISPPSSMEEDKFSRSALRDAYCSEVKASTTLDIKDSISAVSSEKVSPSKSPSLSPSPPSPLEKTPLGERSVNFSLTPNEIKVSAEAEVAPVSPEVTQEVVEEHCASPEDKTLEVVSPSQSVTGSAGHTPYYQSPTDEKSSHLPTEVIEKPPAVPVSFEFSDAKDENERASVSPMDEPVPDSESPIEKVLSPLRSPPLIGSESAYESFLSADDKASGRGAESPFEEKSGKQGSPDQVSPVSEMTSTSLYQDKQEGKSTDFAPIKEDFGQEKKTDDVEAMSSQPALALDERKLGDVSPTQIDVSQFGSFKEDTKMSISEGTVSDKSATPVDEGVAEDTYSHMEGVASVSTASVATSSFPEPTTDDVSPSLHAEVGSPHSTEVDDSLSVSVVQTPTTFQETEMSPSKEECPRPMSISPPDFSPKTAKSRTPVQDHRSEQSSMSIEFGQESPEQSLAMDFSRQSPDHPTVGAGVLHITENGPTEVDYSPSDMQDSSLSHKIPPMEEPSYTQDNDLSELISVSQVEASPSTSSAHTPSQIASPLQEDTLSDVAPPRDMSLYASLTSEKVQSLEGEKLSPKSDISPLTPRESSPLYSPTFSDSTSAVKEKTATCHSSSSPPIDAASAEPYGFRASVLFDTMQHHLALNRDLSTPGLEKDSGGKTPGDFSYAYQKPEETTRSPDEEDYDYESYEKTTRTSDVGGYYYEKIERTTKSPSDSGYSYETIGKTTKTPEDGDYSYEIIEKTTRTPEEGGYSYDISEKTTSPPEVSGYSYEKTERSRRLLDDISNGYDDSEDGGHTLGDPSYSYETTEKITSFPESEGYSYETSTKTTRTPDTSTYCYETAEKITRTPQASTYSYETSDLCYTAEKKSPSEARQDVDLCLVSSCEYKHPKTELSPSFINPNPLEWFASEEPTEESEKPLTQSGGAPPPPGGKQQGRQCDETPPTSVSESAPSQTDSDVPPETEECPSITADANIDSEDESETIPTDKTVTYKHMDPPPAPVQDRSPSPRHPDVSMVDPEALAIEQNLGKALKKDLKEKTKTKKPGTKTKSSSPVKKSDGKSKPLAASPKPAGLKESSDKVSRVASPKKKESVEKAAKPTTTPEVKAARGEEKDKETKNAANASASKSAKTATAGPGTTKTTKSSAVPPGLPVYLDLCYIPNHSNSKNVDVEFFKRVRSSYYVVSGNDPAAEEPSRAVLDALLEGKAQWGSNMQVTLIPTHDSEVMREWYQETHEKQQDLNIMVLASSSTVVMQDESFPACKIEL

1. An isolated nucleic acid molecule comprising the sequence set forth in one of SEQ ID Numbers: 1 to 20.

2. An isolated nucleic acid molecule comprising the sequence set forth in one of SEQ ID Numbers: 1 to 114, or a fragment thereof, and which encodes a polypeptide that plays a role in an angiogenic process.

3. An isolated nucleic acid molecule that is at least 70% identical to a nucleic acid molecule comprising the sequence set forth in one of SEQ ID Numbers: 1 to 114, and which encodes a polypeptide that plays a role in an angiogenic process.

4. An isolated nucleic acid molecule as claimed in claim 3 that is at least 85% identical.

5. An isolated nucleic acid molecule as claimed in claim 3 that is at least 95% identical.

6. (cancelled).

7. An isolated nucleic acid molecule that encodes a polypeptide that plays a role in an angiogenic process, and which hybridizes under stringent conditions with a nucleic acid molecule comprising the nucleotide sequence set forth in one of SEQ ID Numbers: 1 to 114.

8. (cancelled).

9. (cancelled).

10. An isolated nucleic acid molecule consisting any one of the nucleotide sequences set forth in SEQ ID Numbers: 1 to 20.

11. Use of a nucleic acid molecule selected from the group consisting of DNA molecules having the sequence set forth in SEQ ID Numbers: 70, 72 to 73, 78, 83 to 87, 89, 160 or 174 to identify and/or obtain full-length human genes involved in an angiogenic process.

12. (cancelled).

13. (cancelled).

14. A gene when identified by the use of a DNA molecule selected from any one of SEQ ID Numbers: 70, 72 to 73, 78, 83 to 87, 89, 160 or 174.

15. (cancelled).

16. (cancelled).

17. (cancelled).

18. (cancelled).

19. (cancelled).

20. (cancelled).

21. (cancelled).

22. (cancelled).

23. (cancelled).

24. An expression vector comprising a nucleic acid molecule as claimed in any one of claims 1, 2, 3 or 7.

25. A cell comprising an expression vector as claimed in claim 24.

26. (cancelled).

27. A method of preparing a polypeptide comprising the steps of:
(1) culturing cells as claimed in either one of claims 25 under conditions effective for polypeptide production; and
(2) harvesting the polypeptide.

28. A polypeptide prepared by the method of claim 27 or encoded by a nucleic acid as claimed in any one of claims 1, 2, 3 or 7.

29. A method of modulating angiogenesis comprising modulating the expression or activity of a polypeptide in a cell, wherein the polypeptide is encoded by a nucleic acid sequence as claimed in claim 1 or 2.

30. The method of claim 29 wherein the nucleic acid sequence is selected from the group consisting of SEQ ID Numbers: 1 to 20.

31. (cancelled).

32. (cancelled).

33. The method of claim 29 wherein the polypeptide forms part of a polypeptide complex.

34. The method of claim 29 wherein the expression or activity of the polypeptide is modulated by introducing into the cell an antagonist or agonist of the nucleic acid molecule or a polypeptide.

35. The method of claim 29 wherein the expression or activity of the polypeptide is modulated by introducing into the cell an antisense to an the nucleic acid molecule.

36. The method of claim 29 wherein the expression or activity of the polypeptide is modulated by introducing into the cell a nucleic acid molecule which is the complement of at least a portion of a the nucleic acid sequence and is claimed in any one of claims 1 to 10 and is capable of modulating expression or levels of said nucleic acid sequence.

37. The method of claim 36 wherein the nucleic acid molecule is an RNA molecule that hybridizes with the mRNA encoded by the nucleic acid sequence.

38. The method of claim 36 wherein the nucleic acid molecule is a catalytic nucleic acid molecule that is targeted to the nucleic acid sequence.

39. The method of claim 38 wherein the catalytic nucleic acid molecule is selected from the group consisting of a DNAzyme and a ribozyme.

40. (cancelled).

41. The method of claim 29 wherein the polypeptide expression or activity is modulated by an antibody capable of binding the polypeptide.

42. The method of claim 41 wherein the antibody is a fully human antibody.

43. The method of claim 41 wherein the antibody is selected from the group consisting of a monoclonal antibody, a humanised antibody, a chimaeric antibody or an antibody fragment including a Fab fragment, (Fab′)₂ fragment, Fv fragment, single chain antibodies and single domain antibodies.

44. The method of claim 29 wherein the polypeptide expression or activity is modulated by introducing into the cell a nucleic acid molecule comprising the nucleic acid sequence, or an active fragment or variant thereof.

45. The method of claim 44 wherein the nucleic acid molecule is introduced by way of an expression vector as claimed in claim 24.

46. (cancelled).

47. The method of any one of claims 29 to 46 wherein angiogenesis is uncontrolled or enhanced.

48. The method of any one of claims 29 to 46 wherein angiogenesis is inappropriately arrested or decreased.

49. (cancelled).

50. (cancelled).

51. (cancelled).

52. (cancelled).

53. (cancelled).

54. (cancelled).

55. (cancelled).

56. (cancelled).

57. (cancelled).

58. (cancelled).

59. (cancelled).

60. (cancelled).

61. (cancelled).

62. (cancelled).

63. (cancelled).

64. (cancelled).

65. (cancelled).

66. (cancelled).

67. (cancelled).

68. (cancelled).

69. (cancelled).

70. (cancelled).

71. (cancelled).

72. (cancelled).

73. (cancelled).

74. (cancelled).

75. (cancelled).

76. (cancelled).

77. (cancelled).

78. (cancelled).

79. (cancelled).

80. (cancelled).

81. (cancelled).

82. (cancelled).

83. (cancelled).

84. (cancelled).

85. (cancelled).

86. (cancelled).

87. (cancelled).

88. (cancelled).

89. (cancelled).

90. (cancelled).

91. (cancelled).

92. (cancelled).

93. The use of a nucleic acid molecule as claimed in any one of claims 1, 2, 3 or 7 for the screening of candidate pharmaceutical compounds useful in the treatment of angiogenesis-related disorders.

94. A compound useful in the treatment of angiogenesis-related disorders when identified by the use of a nucleic acid molecule as claimed in any one of claims 1, 2, 3 or 7.

95. The use of a polypeptide as claimed in claim 28, or a polypeptide complex as claimed in claim 23 for the screening of candidate pharmaceutical compounds useful in the treatment of angiogenesis-related disorders.

96. A compound useful in the treatment of angiogenesis-related disorders when identified by the use of a polypeptide as claimed in claim 28, or a polypeptide complex as claimed in claim 23.

97. The use of a cell as claimed in claim 25 for the screening of candidate pharmaceutical compounds useful in the treatment of angiogenesis-related disorders.

98. A compound useful in the treatment of angiogenesis-related disorders when identified by the use of a cell as claimed in claim 25.

99. A method of screening for a candidate pharmaceutical compound useful in the treatment of angiogenesis-related disorders comprising the steps of:
(1) providing a polypeptide as claimed in claim 28, or a polypeptide complex as claimed in claim 23;
(2) adding a candidate pharmaceutical compound to said polypeptide; and
(3) determining the binding of said candidate compound to said polypeptide;
wherein a compound that binds to the polypeptide or polypeptide complex is a candidate pharmaceutical compound.

100. A method of screening for candidate pharmaceutical compound useful in the treatment of angiogenesis-related disorders comprising the steps of:
(1) providing a cell, as claimed in claim 25;
(2) adding a candidate pharmaceutical compound to said cell; and
(3) determining the effect of said candidate pharmaceutical compound on the functional properties of said cell;
wherein a compound that alters the functional properties of said cell is a candidate pharmaceutical compound.

101. A method of screening for a candidate pharmaceutical compound useful in the treatment of angiogenesis-related disorders comprising the steps of:
(1) providing a cell, as claimed in claim 25;
(2) adding a candidate pharmaceutical compound to said cell; and
(3) determining the effect of said candidate pharmaceutical compound on the expression of the nucleic acid molecule that is part of the expression vector in said cell;
wherein a compound that alters the expression of the nucleic acid molecule that is part of the expression vector in said cell is a candidate pharmaceutical compound.

102. A method of screening for a candidate pharmaceutical compound useful in the treatment of angiogenesis-related disorders comprising the steps of:
(1) providing a cell, as claimed in claim 25;
(2) adding a candidate pharmaceutical compound to said cell; and
(3) determining the effect of said candidate pharmaceutical compound on the expression or activity of the polypeptide encoded by the nucleic acid molecule that is part of the expression vector in said cell;
wherein a compound that alters the expression or activity of polypeptide encoded by the nucleic acid molecule that is part of the expression vector in said cell is a candidate pharmaceutical compound.

103. A compound when identified by the method of any one of claims 100 to 102.

104. A pharmaceutical composition comprising a compound as claimed in 103 and a pharmaceutically acceptable carrier.

105. An antibody which is immunologically reactive with an isolated polypeptide as claimed in claim 15.

106. An antibody as claimed in claim 105 which is a fully human antibody.

107. An antibody as claimed in claim 105 which is selected from the group consisting of a monoclonal antibody, a humanised antibody, a chimaeric antibody or an antibody fragment including a Fab fragment, (Fab′)₂ fragment, Fv fragment, single chain antibodies and single domain antibodies.

108. A catalytic nucleic acid targeted to a nucleic acid sequence as claimed in claim 1.

109. A catalytic nucleic acid of claim 108 which is a DNAzyme.

110. A catalytic nucleic acid of claim 108 which is a ribozyme.

111. Use of a nucleic acid molecule as claimed in any one of claims 1, 2, 3 or 7 in the diagnosis or prognosis of an angiogenesis-related disorder.

112. Use of a polypeptide as claimed in claim 28 in the diagnosis or prognosis of an angiogenesis-related disorder.

113. Use of an antibody as claimed in claim 28 or an antibody to a polypeptide as claimed in claim 16 in the diagnosis or prognosis of an angiogenesis-related disorder.

114. A method for the diagnosis or prognosis of an angiogenesis-related disorder comprising the steps of:
(1) establishing a profile for normal expression and/or activity of a gene as comprising a nucleic acid as claimed in claims 1 or 2 in unaffected subjects;
(2) measuring the level of expression and/or activity of the gene in a person suspected of abnormal expression and/or activity of the gene; and
(3) comparing the measured level of expression and/or activity with the profile for normal expression and/or activity;
wherein an altered level of expression and/or activity in said subject is an indication of an angiogenesis-related disorder, or a predisposition thereto.

115. A method as claimed in claim 114 wherein reverse transcriptase PCR is employed to measure levels of expression.

116. A method as claimed in claim 114 wherein a hybridisation assay using a probe derived from the gene, or a fragment thereof, is employed to measure levels of expression.

117. A method for the diagnosis or prognosis of an angiogenesis-related comprising the steps of:
(1) obtaining DNA from a subject corresponding to a nucleic acid sequence as claimed in claims 1 or 2; and
(2) comparing the DNA from said to the DNA of the corresponding wild-type gene;
wherein altered DNA properties in said subject is an indication of an angiogenesis-related disorder, or a predisposition thereto.

118. A method as claimed in claim 117 wherein the DNA of the gene is sequenced and the sequences compared.

119. A method as claimed in claim 117 wherein the DNA of the gene is subjected to SSCP analysis.

120. A method for the diagnosis or prognosis of an angiogenesis-related disorder comprising the steps of:
(1) establishing a physical property of a wild-type polypeptide as claimed in claim 28;
(2) obtaining the polypeptide from a person suspected of an abnormality of that polypeptide; and;
(3) measuring the property for the polypeptide expressed by the person and comparing it to the established property for wild-type polypeptide;
wherein altered polypeptide properties in said subject is an indication of an angiogenesis-related disorder, or a predisposition thereto.

121. A method as claimed in claim 120 wherein the property is the electrophoretic mobility.

122. A method as claimed in claim 120 wherein the property is the proteolytic cleavage pattern.

123. A genetically modified non-human animal comprising a nucleic acid molecule as claimed in any one of claims 1, 2, 3 or 7 or in which a nucleic acid as claimed in claim 1 or 2 is disrupted.

124. A genetically modified non-human animal as claimed in claim 123 in which the animal is selected from the group consisting of rats, mice, hamsters, guinea pigs, rabbits, dogs, cats, goats, sheep, pigs and non-human primates such as monkeys and chimpanzees.

125. A genetically modified non-human animal as claimed in claim 123 wherein the animal is a mouse.

126. Use of a genetically modified non-human animal as defined claim 123 in screening for candidate pharmaceutical compounds useful for the treatment of angiogenesis-related disorders.

127. (cancelled).

128. (cancelled).

129. (cancelled).

130. (cancelled).
